United States Patent Application Publication US 2020/0329713 A1 - sequence listing, part 8

SEQ ID NO: 3 - DNA, 6122757 bp, Bacillus thuringiensis (residues 1-2,040,919 of 6,122,757)
gaataacgttttttgacacttgggggtagtgcaaattcttaagttgatgggcatgtgatgtgacccttattacagataatactgcagctcatgctattcaaacgaaagaaataaatgcaattattgtaggggcggatcgaattgtcgcaaatggagatacggcaaataaaatagggacaatgaatttagctattttagcaaagcactttaatatcccattttacgttgctgctccactgtcaacatttgatgttacgaaagaaactggagctgaaattattattgaagaaagagatgaaacagaagttacgaaaatctttggaaaacaagtagcaccaattggaacggatgtttataatccagcatttgacataacgccgaatgaattaattacaggaattattactgagaaaggtattatacgcggggactataaacgagaaattgcatcattatttgaaaaacaagctaatacatattttactgaagaacaagaataatggattttagggctaactctagccacgaaggcatgttgttaaacaattatatgataataaaaaaggtggggaatccactccttttatcacgacatgttttttattaacacaattagcgattaaaaccatgaaaataggtgtatcaagcaaagtgttgatacacctattttttatagcctctattactacttttattcaaaacatattttgaaatgtattgagccaataatataacaatacactatattttatttatgcacgtctcttttgaaatgcatttgttccattttcgattatcatttgtagtactgttttccatacactatgattaggatttggttcttttcctttgcccatcaatttaaattgatgttcataccaagtaagctctaacatagaagatatttttttatctagctttttcacacctgttcgaattggcttgatcgtaactgtgtaataattgccatgaataatctggtttggaaaatcagggtttaatgcaaatagctttccaacgccaaccatgtctacagctccactttcaattgcctcattcataccttcttcggaacggaaaccgcctgttacgaccagtaccgcttgtacgagtgttcgagccttttgagcataatctaaaaaatatgcttcacgtttttttgtactttcacgtactccctcaaacattttaggattttcataattcccaccagaaatttcaattaaatccatacccaaatcgtccattttttttagtactttcatcgattcttcctcggtgaaaccaccacgctgaaagtcagcagaatttagttttaacccgattgggaatttctcaccgacttgtttacgaatttcataataggtttcaattaaaaatttcatacgcccatttaaatctcctccccattcatcttggcgctgattatgatgaggggataaaaattgattgattaaataaccatgggctgcatggatttgaacaccagtaaaaccagcctttttggcaatacgagcggcattgccaaatcgtttgattaactgccaaatttcatctgatgttaattctcttggtttattgaagaaatctttaatatcaccagtaagtggaatggcgcttggagcaaccggatttttagataatgttttcggagattgtttaccgggatgattgatttgcatccaaagctgtgtcccattttgcgtcccagattttgcccatctttttaagatatctaaatcacgttcatcttcaataacgacatttcccggttcgccaagtgcctcacgatcaatcatgacatttccagtcatgagtaaaccagccccaccttgtgcccaacgaccatatagttttactagttcttctgttggattattgctttttgttgccattgtttcactcatcgcagctttataaaagcggtttttcacagtgaatgtagttgatctattcatcgtcgtatttaaaagagtctttttcattttttctatcctttctttatttatttgatggctcccaatgctcatcaatgtaatcatccatctgttgaagtaaatttttcaccatttttaaactattattttccgggtcaatgtaataaaaattcatcgtcgcaacacgtcttacattgacaacctttgcgtcttttagcacttttatgtgatgggaaacagcaggacgtgataaatgtgttttacgtgtgatttcgcctactctcattccatctccacagcccgcttcaattaaggtaacaatgatcgattgtcgtgtggagtctccaatcgctgttaagacagtttggcatgctttaaaatcatctgttaatttattcaatttttgtacattcttcatccactgcatctcccttcgtttaatcgattgaaccattcaaatcttatcataattatttcacgaataatcaatgggaaagaaaatggagaccattgaatttcattcccaatttttacagtaagtttccacaattatttttaaaattagctttgcttgaagtaataagttttatgaatctaatccaaaaacaagtgactctaaaaataggatatgcttcctctttttattgccacttgttttgattgcctatttaaaattcaatacagttaccttttcacgtgtcatagactcaaggctcttacgaataccttgtgcacccatacctgaaccttttacaccgatgaatgggaagtggtcagggccgcgctctgtacgtccgttaatttgaacagaaccagtttcgattttattagcaattgcaaatgctttgttaatgtcttttgtgaagacacttgcttgtaagccgaactctgatttgttagcaatttcaattgcttgctcatctgaagaaacgcggatgattggaaggattggaccgaatggctcttcccaagcaactttcatttcttcttttacgtggtcgattaatgttgggtaaattaagttacgctcacgtttgttaccgataacaatcgtagcacctttttctacagcgtcgtcaactaaaccttgaacgaagtcagcagacttgtcatcgattaatcgaacgattgtgctatctttctctggagatccaactgatagttccgctacttgcgcttttaataagtcaacaagctcgtctgctacgttttcgtgtacaagtacacgcttaatagctgtacaacgttgaccagagtaagagaatgcaccgcttacgatatggtttgcagcatcttgtaaatcagcatcttcacgaacgataccaggatctttaccgccaagttctaatacaagtggaatcattgcagctgttttcgctaaatgcttacctgtgtttgtaccacctgtgaacgataccatattgatgccttcgtgccctactaaatagtccccaattgcagaaccgcgtcctgtagctacgtttacaagaccttttggaaggccagctttatgaagtgcttcaaccattttaataccgctaattgcaccttgagttgctggtttgaaaataacagcattacccataattaatgctggtgcaagttttgcagcagataagtttaccgggtagttaaatggtgcgattgctaatacaacaccaagtggtgcgcgttggatgatcgcaagtttcgatttcgttccgccagggaagctatcgcccatcatgctttctccgtgcatatgtaaagcttcttcgattgtgtaacgaatgaagtcagctgtacgaacaacttctttcttcgcatctttatagcctttaccgacttctttcataatgatatcggcaatttcatcctgcatatttacgagctcatcagcccatttatataagtattttgcgcgatcttgtagggaagctttagcccatgatttttgagcttcttttgcagatgcaattgcttcatctacttctccgcaagtaattgcttgtacttgtccaattacttcgtgtaaatatggagatgaaatttcaattgtttctcctgaagagctttctctccattctccatttacataaaaattatatacattaaccaccataattcctccgcctctaagtttggctcttatcaaaaagcccaataatttatcctatgttattcaatttgttcaatttagtttataagtaattttataaagttaactttcattgattcatccacaaagatttctaaaactaatatatctattttcttttgctttttcatgtgcgcacatttcctttactcttttgtttaatcattcgaacgattgaatcataacatgttatttaaagaaaaaaacatcgggaaagaaagtggagaccattaaaataagttcatgggctaaacatatacaaattaaaagtatttgtgatacgatgcttagataacattactgcaataatcatttgttaaattattttgtagcagagggttatagtaaagacaagcaaggaatatatgtaattgcaactcaaaagattacattaaagcataagagttcaaaatatctctaaataggagagtaaagactctttgacagaaacattggtaaaattctatactaaataaacgtccaagggttcgaataattaaacagggagagatatcatgagcaaaaaaacaataggcatattaagagaatgcactcctattttttcaattctgcaggatctaaatcgtcaagatatattggtgttactttatgatgaaggagaaatgtctgtaaatcagatagtagaccgactttctttatctagaccagctatttcacaccacttgaagcatcttttaaacgcaaatctagttactgttcaaaaacgtgctactgaaaggtattatgccctttctcttgacaactccattgtattattaaaacaactaattgaatcattagaaaccgataatcaattaaagaaataattaaaaaatagtgtgcacaatgataaaagtagtattttacaatgctactttttctacaaagtgaattaaaaaatatttattgacaaagataaaagagtcaaataatattttacttgcaaagcgttcgagtgttcgaacattagaacgtaatgattttagaaatttattttaaacattttaaggaggaaacgaaatgaaatacagtgaacaaagtgcatggcgtgaaatacaagcttatttacctaaaaaatatcactttacagataattatcatccaacagaagaatggtggaattggaaaggacatgaggtacatttagactgttttcgaaataaaaacgcacccgttaaagttattttattacatggagtaggtacaaacggtagacagatgtccatgattttaggaggtcctctttcaaaagacggattcgaaacgattgctattgacatgcctacctatggagttacaaaagtaaaaaaaggttctgtagtaaagtatgatgactgggtggatttagcaagtgattatatcgactatgaacaacaacgtgatgatagacccattgtactgtatggtttaagtgcaggtgggatggaaacttaccacgttgctgcaaaaaacaagaaagttaaaggaatcattggtatgacattcttggatcaaaaaaatcaacaagttcgtgacgaaacagctaaaaatctctttatgagtcgtgttggaatacctatggcaggcgttgcaagtaacataggacttgaaaactttaagatgaaaatgagtacagcttctaaaatgagtgccttatgtaataatgagaaagtgatggaaatatttaatcgtgataaaacctctgctgcaaataaagcaagcatgagattcctagacagttatggtaattacaagccagcaatggaaccagaagattttgatgtatgtcctattcttttaacacaacctgaacaagatagatggacaccgttgcatttaagtactccattcctaaacaaaataaaaaaagtggatgtgaaaatagttatgttagaaaatggaggtcattatccagtggaacaacccgcgttagatcaaatgcatgatgctatcgtggaattcatctataaggtcacaaaatagcttgacttgcaaaacattgcaattgaacatatgttgataaaaaaactccttttagcattagggagtttttttatttttggtatacaatatccattacaaatgaattctttaattcactagattcaatgaatactcttatattttcaccggtgattttattaatatcacttatttaattggtcctccagtatacattattaacggtataaagcacttatcattttgaagcttttttagctctaattcgtgtctctttatgtaatacattaattatctttgtagtacattattttttatgtgggaacaacgacaaattattgtttcaattcaatttttatccctcgtatgtctcaaataacttttccaaatactctagatttccttctgctatatattgctcagcttctatcaaacgcgttgctaattcagtctttgttaaacgcatatattgtttgtacacattctttaaatttctgtccgtctttaattgctcgaactcatgaaaagtatttttttcattttcgcgatagggaagatgcttttctagctctttttgttttttcttatagctcttactcttttctttataatacgcatagagttcttcatgatttctaatagtattaaaatgaatccctttgccttgttcatcgagttcttttgtctttttagatacattgtgtaaggtaacttctttgccctccgcaaggagggtatctattgcttttttacctagttcgaaggagttaacccttcttttttcgtaatcacgctctagaccacttttatggttttctatggataagtcttggctcattttccttatctctcctatactcctcgattaatgctatttctttcaattcagctttcgcatcatgtatcgtttttttcattttcaaaacttccagtttgaaacctttttcctcgtgatacttcttcgatttttctgcccaatctagatattcaagtaattcatctttttgttctggctcaggtattttagtgctgcatcctacacatgcaagttttgttggacaaatcttgttagtaacacatgtacccccaacggttttactaaatgggccgctgatctctctttgacgctcaaaaagggcttgtatctcttctggttgtcttaaaacttctttcatcatgtcagttgtagcggccatggaagtatgaaactcggaaataacatcggctacttgtttttgggtaggttgagagtaatatcttgtaacgtctaaatccttttgattaagaatcattgctacgacgtcaattggaaggtcttctgcttgtacagcgtgtgtcgcaaaaccgtggcgtaataagtgtggtttcaattttaccaacttcttgtcttgtgtttcatagatcaatccaaaacagatgaaatttaaaacacatgcaaaagtcacctctccaaaatgtttaccatggaactgaaataaatagagttggtctggtcgcgattcccctgattgcttcgaataacggaaatccacccttggaattgagcctttataatgttgatttctaaggtgaaaagcaatttcctttattaaatcaaaagtatcttttgtcgtataaaaaactgctaactcatctcttcctttcggaatagctctaaatatataagatgtttttccttcatttatttcgggagcagtgatatttatctggtctaaacacccaataccaagatgaacttgcgccacttcacctaaccttgcacctgaagacgtaaatatatctagtgccgtcgcaccaaacaaagctgttatatacaaaatctcaacgttcattaaaatgccctcggcatattcctgggagttagttataaaagtcccttgtgctagaatacctttatgatcgggttggaaaggtttattaagttcttttgaattgggttccctatatccataggtttcaagtactttcaacctttcatttatttgttctttatttaaagatcggtaccaacttccgattaattgatgttctaaaatgggtataaaccaaaaaccttcagtttcttctgcgggtttaccagtttcatcatctaatattgcagcgtttaaaaactcgacgaagtattcgttgttttcatctaaaaaagtagctcttcgcccctttgcattattaatggtagcgtaagaataatttttactatgatgaagtacgaaagaaggtttatcccataatcgaaacaagaaaagctcctttgatctatcttcgcgttccttgttttcaatataagaaaattcaaaaggaagaggatatccgttatcttttacaaattctacaacctcaagatatttctgtcgcaaacgcctaacctggtttaaacgaaacccaccttcggcacgaatttttataaattccttggaaattgcgtccgtttcagacttccttttccttttcgaagcgtcctttgctgctttattaactttaaaatctctactatctaggtgtgtttgagggagtaaaaaaggggcgaacatttcttgttgctcccttgtcaacttggtcgaatgccacttatgcacgttttttacaacatttttataactagtaaagagttgaattctcttgttatctgaatgggagggaagaatctcccttcgtagataatcggacagatgtatatctacctcaaaatcattaagacttgccaatttggtttcttgaaagagttgcttaaggcagagatttatacttgcaatatttgtgtgaatagtcttaggctttaagttttgattggatattaccatcaatcctagcgctaagtggtttgtaaaagggtaaccacagcacttgtttttgaagtaacgcaaatgcacagggttaaccttattccaaaagtagccttgtttatcctgatatgtaaggacgttgtcatcaacttttccttttaaatcttgataccatagtttgctttttaattcatcaatcacattcccacacccttaggcttatttatagattaactattcaattcattaataaaatccattaattcatgttgtttttcagacatttgagcaattttatttcgaggttcaaccgaaggttgtttaaatctcttacgaggttttagctgatttaaatactcctcctgatcctttttcatcatttctaacaatttattgtgttgctctaccacataatccttctcatcaacatgatgttcatagacttttattgtgtctgctttttcgctccaattcatataaatccgtaatcgtccaattgcataatcctgttctactttatccttgtatttttcgcgaatcatcctaatactacgggtcacgaaccaatgacgtgttttatgaatattgatttttatttctgcttttttcatgatgtttatccaattttttaaaaaggcatcataagtgtagggattgccatactgattaagaaatattgggatttcatcagggatttcattcattttcaaaccacttttatcaactttctttctagcaccatggatataacgatcaagtagttttaacgtgtcagtatctactttcaaaaactttgttcttattccatcgcttcccttattaaatgtagaaaactcacccttatcatacctagcacgatagtctccaaatgtaagtttgataacttctgtcgctctagctccggtttgaaatagcatcgttgtaataatttcatctctaagcttccatttactatcctttccagccttataaatcataaaggggaggtgaggatcatcaataatctctggcttccactcgccatttatgattttaaaaaaagagttggttaatcttcgacctcttttagataaaggttcttctgtacctgcttctttaggcattctaggtttgccttccctaacaccctctatttgcatttcatactcgtctaaaatagcgtgtgcatcaataagtggattgggagaaaggtatattttcatacgtatcatgattttgtagaaagattttaaaacacttaacatcctaccgacagtattaggacttatatttgttaactttacattgtaatacgttttgctatcgcttgttgtaaccttgcaatgagctttatgcatcaaaaaatcctctatggctatccgtacaatgtggggttcatcatcccaatttacagctcttccttgataattactgtcagtatgcaaccaggtgaaaaaagtatagagtgtttttagataggattctgcactactttctgtaattccacccaatgcctccttataaaaaactgtaaggggaaagaatggtttaaggtgtttgtccagtacaattaatttaaatttcttagcttttaccccttcggggcattttacgtgatgatacaaacttcccatctttatataaccacctttattcctgttccagccaattgtagagaggaatcgtttctgtctgttgttcctttaatgccaaagattcatagtcacgctgtgtcaaatccactaatctctttttttctccatctgcaattggatctggcatccaattcttcgttttagctgctttgacaaacttgtagggttcatcaatcggtctactttgttgccttataatgagacaaatttcaagcacacgctccaatggtaaagagataagaattttatgtacttcttctggaggggaagtaagagttgtcacttgatatgccaatttgactaattcagatttgttgtaatccggagatagagatttctttttaccttgaacttttgctagggaagagccagttaacgttgctacatcgcttgcaggtatcttccaaccttcttttcgactattttgaaaggcttttggaaacattccatcttttatctttctttttatagtttcttcattcttatagcccattagggctgctacttctttaaccgtgaaacacttctccatataaatccccctttagtatcacttgatttgtcatgctgttaaacaggttatacgttctagtgtgtcccacaaaaaggaagtataaacaataatcggtagattttgcactgttaagtaaagaaattatataaagataaaaaaatacactccattcaattaattgtcagaaacatgacagataaataataaaaagactagctaagtggctagtcttttttctcgtattttgctactaaacttttcggtaattctttggtcatataaacagcaatttgagagaactgctctggtgtttcctcaaaatcgcttctaatccattcaccgattaaactcgttaacatccctgacaaaacggcaaatgcatatctttttggtatgtttggaataattactactttcttatcgatccaaattgattcaaattttcctccgattttacttagaaaggttggatcctctttatcactagttaacagacggataagctttttattatctaataagtaatttgccagcttgataaatgtagtaataaaagtggtcataaagaggttgaatgtaatgataaaaacataaaaaatagacgtatcaagcaaagtgttgatacgccttaaaactacattgttaaacaacatgcgtcgtcgtgtagtaataatgatatttatttaattatcttaggttcagtattacatattaatagcttgtttttttatgcctaaatgcagtgttttctcttacttatataatgaaaggaggggaagaggatggaagagtggatcaagatgataggtaatgtagggtttccgattgttgtaacattatatttactccaccgtattgaaagtaaactagagggggtaattgttgcaattgagaagctcccgcggcaattactaaagtacgaagatcctcgggaataaaaataaagtttgctcttcttgagcaaactttatttttattgagcggtataaccaccatctacaacaacagcttgtcccgttatacctttagctttttcactcgctaaaaacatcgcataatcagcgatttcttgtacttgtaataagcgcttttgtgggacgagtggataaataacatcttctaaaacattttcaagtggtacatttcgtgtagtagctaagtcttgtagttgattacgtacaagaggggtatcgacataaccagggcaaagggcattaacagtaataccatgcgtagcaccttctaaagcagcaacttttgttaatccaattacgccatgttttgcactattgtaggcagcttttccagcaaatccgacaaggccgttaatagaagcgacattaataatacgaccatatttttgttgtttcataatcggaaaggcatgcttaattgcgataaacggagcaatttgcataatttgaattagtagctcgaacttttcagttggaaagtcttcaatgggtgaaacgtgttgcattcctgcgttgttaattaatatatgtaatgaaccgaaatgatcaactgtttgagaaattgctgctgtaatttcctcttcagatgtaacgtcacattttaaaccgatagcttgaaaaccttcattttgtaattgttcagcagcttcttttgcacgttcttcaagtcgatcggtaatcacaacttttgcaccttcttttgcaaaagcctttcccatttcataaccaataccacttgcagcacctgttaaaaagacaactcgatttgtaaccatgatgaaaaacatcccttcataataaagttttcatagtgctctatttagagaagctataatgaaattcctgcaaacatttggaaaaaaatatcgttaggaggatttaaattatgtcgacaagtcaaatgctgaaagggattttagaaggatgcttacttgctattatttctgaaggcgaaatatacggttatgaaatgagtgaaaagctagcgaagtatggttttacaatggcgagtgagggaagtatttatccgttattaatacgaatgcaaaaagaaggactaataacaagcgtaatgaaggaatctccatctggtccaaagagaaaatattatacattaacagaaaaaggcgaggaagcacttggtgaatttatggatcgctgggaagcgatgcaaagtagtgtagagcgtctacttgaagggaaggggagaaaaaaataatgctatcaagtgaagcgcgaaagtttttgttagatatgagattatttttgacggcaaagagtgtaaaagaaagtgatattgaaaactttttagaagatgcagagttgcatttaatagaagctgagagtgaggggaagagtgtagaagatattttcggaagctcaccgaaagaatatgcagatgaacttgtaaaagtgatggaaagggatagacaggaaacgtggaagcaaattggttttacagtaatgaatatcgtatcgttttggattattgcttctatcttaatagtgaaccatggaatgttacagatttcacttattcagtgtatcggttatagtttttcatttattttagttgttataggtcctaattttctacttcgcaaaatgacttttgtaacaagtttttcaaaaacgtggttttctatgtggtttttagtaatgatagcgccaatgtttttaatgggagttattatggtactagatgtgatatatcctacaaaaatgtttatattcaatcaaatgcaaagttatttattggctggtggtatttttatcattacagtagcggtaaatatgtattttgatggatggtttaaaaatttatatttaattattccactttcgattatgttactatttaaaacatttacatcagaagatctcgtgccaatgttatttcaaattatatgtttatacggaagtttgtttattttaatcttccttgaaattatgatgaagacgaatagaagagaaatgattaaataagggaggagttataatgaagatttctaaagaaggtgaaaagtttttaatcgatacgaaagtatatttaataacaaaagggattaaagaagaagatgtggacgcttttctagaagatgcagagcttcatttaatagaaggtgaaaaaaagggaaagacagtaagtgacatatttggtgactcaccaaaagagtatgcggaagaattagcgaaagagatggagaaggataaaagcgggagcataaaaagtattttagggatgattattggtattggtggatattggttactgacaaatattttatttggaagccccgatcaacaatttacgttaacaaatgtacagttaattggttatcctatcgttttaatcattacgattattggaatgattgttgcatttagaatgtcttcttttaaaagtaaattagtagaatttggaatgatttatgtaatagtaatggttcctattttattattggtgttattgatgtttatgaataaatggtatgggacacctgtattgcaattgtcgacaatgcaaacatatatattagcagcaattatctttttattacttcttattggtgaagtatatgctcttggctggatgggtgtttttgtactaattgttcctcttatgattatgttcttatttaaagatttagaagaaagtaatgtattttggggaattgcaaaggtcttacttatgtatggaagtatatatggattaatgaaatggtctttaaaaattgaagaaagaaaaagtatgaactagaaattcaataaaaagcggctgctctggatataccaaaaattatttccaaagaaatattatatagggatttttagagggattacatttacatttagttgtctatttttatttctagcagccgggattttgtttgttgattggaacaagttgttttaaacagtaacatgagggttactgtttttttctttgtagtaaagagctttgtaaagagagcgctttttgttctgttgttaataaggaatgaatatgaacgttttctggacgagggactatcggatacataagatttgttggagaagggtggtgctccgagccggttggagaatgaggatctgcatgagtaagttttccatgaatacgtcttgtaaataaaatatgaccgatttcgtgagcgagcgtatatatatttttcgtaggggcagccgaatttgttaaaacgatatagccagtaagttgctgttgttttgctaaagaataagcgcaggcaattactgctgtttctttgaaataatcactgccaatataacaaatataaaggtcgcattcaggagcttcatttacacatgtttggaaaaaggatgccaacttttcttgactttgaatggaatttttataactgatttcacggtcaaaaaaacggaaaagttcatttaatacaattacttcttgaatttgaaatgtaatggggtgccaaattgattctgcaacagctaaatcttttgcgatgcggtcatcagaaatatcggcgccgggagtaatgcaaatacatatattgacgtatggatccataaggaacacctcaaatgaaaaaaagttcttcctataatatatgtgggaaaaagatgtcatgtatggataaacgccttctttattgaatatatagatgacaagtcgaaaaaatttcatagttctataacatggtgtggtcgtctttttgatatagtaaaggaaagggggagaatatatgtatacattaaaaatcgtttcagacagagaagcactttatcaatttgcgagttatgtaagagttgtacaaggggttgaagatgtatatgtagaggtgggagaacctttatatgaacatcctttaatgaagttttatgtacatattaagctgaaagaaacatatgagcagcataaagcgttacaggaaatagcaagattagtagaattgggtcgttttacatatgtccattatcgtaatgatgaaattgaggaagcttttgaagctgtaaaatatgaaagttttaagaaataaagatgaaaaaacggaggcgaaagcttcctttttttctttaaaattacatgaacaaaaagagagaaattttgttatgataagggaggttagggaaaggggaatttacatatggggtatattgaagagttacgaaaagtcgttggtacaagaccgcttattctcgtaggatcagcaatcattatattaaatgataaacaagaagtattgcttcaatatcgttcagatacatatgattggggtgtacctggcggggcgatggaactgggtgaaacgacagaagaaacggcacgtagagagttatttgaggaaacggggttaactgcaaaaataatgcaatttcttggtgttctatcaggaaaagaagtatatttccgttatccgaatggcgatgaaattttcaatgtcattcatctgtatcaggcacatcatgtgagcggggaattaaagctcgatcatgaagggttgaaacttcaatattttccagtagataagttgccaaaattgaatgaaacgacagagaaaattttgcaaaagtttttatatgcactgacagaatagaaggttaattccttctatttttattatattaaatattttgattttttagtatgtttatagtatgatagttatagatatacatcttatggaatttcacctaaaaacttactagggtacataagagaggggcaagtacaaaatgcataatgttgttattacagctgcagttcgttcgccaattggaacttttggaggagcgctaaaaaatgtaacgccagtagaattagctgttcctgtacttcaggaagctgtaaaacgaggcggggtagaaccacatgaagttgatgaagtaattttaggtcattgtattcaaagaactgatgaagcaaatacagcgagaacagctgcattagcggcaggatttcctgacacagttacgggatatacaatccaacgtcaatgttcttcaggtatgcaagcaattatgtcagctgcaatgcaaatccaattaggtgtaagtgatgttgttgttgcaggtggagtagaagcgatgagttcgagcccttatgcattgaaacagcaccgctggggacaacgtctacagcacggagaaattcgtgatacggtgtgggaagtgttagaagatccgattcaccatattatgatgggtgaaacagcggaaaatttagttgaacaatatgaaattacaagagaggaacaagatgaagttgctcttcgcagtcatacattggcactgaaggcaatcgagtctggacactttgacgatcaaattgttcctattacaataaaagaacgtagaaaagaagtagtattttcgaaggatgagcatccacgtgcagatattacagcggaaaaattagcaggattaaaaccagcattccgtaaagatgggtctgtaactgcaggtaatgcatctggcctgaatgacggaagtgcagttctagtattaatgagcgaagaaaaagcgaaagaaaaaggcttacaaccgttagctagaattgttggatattcagtagctggagtagacccgaaaattatgggtattggaccagcaccagcaattcgtaaaggtttagaaaaagtagattggtcattggaagatgcagatttacttgaaattaatgaagctttcgcggctcaatatttagctgtagagaaagagttaggcttagaccgtgaaaaagtgaacgtaaacggtagtggcgtaggacttgggcatccaattggttgtacaggggctcgtattacagtaagtttaattcacgaattaaaaagacgtgggttagaaaaaggaattgcctctttatgcgtcggtggcggtatcggggttgccttatttatagaagcactataaaaaagaagcagctattgctgcttctttttttacgactcaaatagatgatgaaataatcgatcacgattttcaaagagaagtttcgtcgtttggtaatgctcagtttcttctaatgtggattcgtgaatcccttcttgtgttaaagaatatatagtggattcagggtaggccattaaaataggagaatgcgtcgcaataacaaattgtgaaccttgttccactagctcatgcattcgaataagcatggaaagttgtctcattggtgataaagctgcctcaggctcatctaaaatgtataaaccttgtcctgaaaaacggttcataaataaggaaaagaatgattcgccgtgagattgttcgtgtagtgaaacgccgccgtaagattttatagcatctatttcatcaatataagaagcaacgttataaaatgattcagcgcgaagaaagaaaccgtcgtttggtgtattgaaacttttggaaattcgaaggtattcatgtaaagatgaatgtgaatcgttagtgctaaagcggaaattcttcgttccaccttctgcattaaagcctaacgcaattgcaattccttcaagtaatgttgatttacccgttccattttctccaataatgaatgttacatttggatgaaaaactagtgattgtaatgttcggatagcaggtaagcagtaaggatatgcggaaaaactagggatattttctttttttaatgtaacattttgtaaaaagggtacgtcaatcaatatataaacctcaattcataacggattttgattctaaaaaggcggcaaatacaagtgttaatgacacctgaattccttccttattttctgaatattttatgtggattatatcatttaaactatcatattccaatgtgaaaataaatattgcatgaagatccattctctcgttatgatatatggtattctattgaaaatgtgagaaggagttaaagtatgccgtttacatttgcacatccagcagcagttcttccttttgcgaaaaagcattctaaacatatttcagtaacggctcttatattaggtagtatggcgcctgactttgaatattttttacactttagaccgtatggtataattgggcatacgtggcttggattcttatatttcaatttaccacttgtcttcttgttagcatacatatatcattacattttaaaaaagcctttcataacacatttacctaaaccgtttgctggctactatacatatgcagtagacaagcggtgggggcttcatacatggaagcatctttttgtattttgctgttctgcattattcggtatgctcacgcatgttgtttgggatgcattcactcataagacaggctatttcgttatgaaaataccattattacaaagagaatggtacggtatctctgtttataaatatatgcaacatggaagtacatgtattggtgttctactattagtatacgttttatggaagtatagaaatgaaatgggtaaagatcttattttagcttcggaaaaaagaaagtattgggtttcagtaattgttgtagcaactattatatttatcgtgcacgcgttcctagatccctattttcatattttccaaattggaggtataatagtatctggactgacaagttcattttgtggacttgtcattgtttctatagtttacaaagccagggactaattttatattcatgaatgatagcgttaggagaaatgaaatgatgaaagcatggaaaagtatttttgttttatgtagttttcttcttatgttaagtggttgcttccatcaagaagaaaagaaagctgaaccgaagaagaaagaatctattcctgaaacaaaagaatatggtgggcgtgagctgaaaaaagtaggacaaaaagtgaaagaaacaggatggggtacttttaagttagagcagatgcattctgtgaatcaaacatttgaagtagcgccaatgaaaattcacgtacaagatgtgaaagtaatttctttatcacagatgagtgaaaaggcaaaaaaaacattgaaagtatacacggcactaacccctgaagaagtaaaacggagattaggggataaagtaagccaagaagatgcagaattatatgcatcgctaagtggaacagagattagtaatacaattcgttacgttgagattacatataaagtggagaataccggaaataaaaatatgcaatttttctctatgaatgatgttatgattaatggtaagcaacattttaaagtagccactcaaaactttttatatgacgaagatacgttagttggtacaaaaaatgtatcaagagaagactataagcctggtgaaacaagagatggtattattggtttaatacttgacgatggaaaagacaaggtaaaggatattcagtttacaactgatgatttacttgcaggagattcagaaacacaagatgttgtaaaagagccacaaacgtttaacatctcactaaaataatgtaaggcaaaacagtcagcattcaaatattatgctgactgtttttttatttcttttatgtatgaatctacattttgaaaaggcaccttaattttaaacgcatctttttgttcattaaattgcttttcattgtagggaccgaaacgtttattgtgctttacgtcaataatccaataatgttcactttttttatttgcaattgctgcgtcagggttattcggatctgatttttcctcggtttgttttgcaataatgtatttatcatcccaagcaatgtctgtaatttttgcagggatgtattgtgtggcatatacagcatcttgcgaggggaaaagttcaaatgcatttccagaagtacgtatgagttcgtattcatcgttaaccgtataagttaagtgacctgtgtttcctgtacaaccagttaataggaaggcgacgaataggattatccattttttcaatatgggaacctcctttataatgctattgtaacaaattgtacaagaaaagtaagagaaaggctagtttacaatgttttttagaagtggtacgatgagacgggtaaagaaggatatgaaggagtcgacataaaatgaagttaaagatgcatcgtccagcgcttgtaatgaatcgcataggtgcttccctaattgacatgtttttaatctcggttatgtatggtgtagtagtagctattatgaccggaaactatagtgctatgtttaagcgctttaatataagcttaggtgattttagatatgatttcgcagtagtttttatattaatggcgatatattttattgtgttaccctttatttggaacggtgttacacttggaaaaaaggtaacgagaataaaattaatttcattgaagagtgaaaagctaacgttgcaaacattaattataagattttttgtagtgttattaccgaacgtattgctattaggaattccattaatatgtaatatatatatgatgttgttccgcaaagataattgtggttttcaggatttaattacaaaaacgaaagtaataagtcttgtataatgaaaaaaagacctttttatatataaaagggtctttttgattttataagtatatggggaatgtttacagtaaggaaaagctaaaatgtgttaattctatttataatagattgaaaaataagaaaatgatataatgattaaaaataatatctttattccgccatattggggctgattaaaatttcactttatataataagggggagattaaaatgactggaggtagtgtaatcttttgggggattttaattttcatcggtttagttttcgattagcgtaataataagaaaaaagaaggataaaaagtaaacgtttacaagtaaaatagcaatttttcttgcttgcagattaatcttataaaggagtatactgaatgacggtaagacttatagaaggggtaatgaaaatgaagcttgcaggaaaagttgctatcgtaactggcggtggcatcggtattggacgtaatacagctcttttgttggctaaacaaggcgcaaaagttattgtgacggacattgatcaagagagtggacaagcaacagtggaggaaattatgaatctaggcggagaggcactttttgtatcctatgatatgggaaagcaaggagattggcaacgcgttattagcattactttgaatgcattcagtcgcattgatatgctttttcaaaatgcaggtttatataaaatagattctattttttctcgccaacaagagaacgattccaatgtactttgtattaatgacgtttggatagagataaaacaattaacgtcatcttttatgaaacagcaagaagaagtggtgcttagtgatttaccgattttcggtattattagcacaaaaggacaatcatttcatacagtagaagccctagtataataataaaaaccgccctcaatatatgtggacggtttttttgtatgtgtatagtaaagataaattttttagcgaatacgttgttcagtttggttatcaaagaaatgtgctttattcatatcaaatgctaatttaatttgatcaccaggtgaaaatgtatgtcttgcatctacacgtgctgcaaaatcttgatttccaagtttcatatataaaatggattcagcacctaataattcagcgacttcaatttttgttgtgaaggcagtagattgcgaagcttctaaaaatagtagttcatcatgaatgtcctctgggcgaatacctaaaacaatttccttatttacatagccttgttcacgtagcatcttcatttttccttcagatactttaatttttatagtattgtctataacgaaatcggtttcagtcaatttaccacggaagaaattcatagctggtgagccgataaatccacccacgaaaatgttttctggcgtttcgtatacttcttttggagttccaatttgttggatttttccatccttcataacgacaagacgcgaagccatagtcattgcttctgtttggtcatgtgttacataaattgttgttgttccaaggcgatgatgtagcttagaaatttctgagcgcattgcaacacggagtttagcatctaagtttgataatggttcatccattaagaaaacttttgcatctcgaacgattgctctacctaacgcaacacgttggcgctgtccacctgataatgctttcggttttctatctaaatattgttcaagtcctaaaatttttgctgcatctttcacacgacgatcgatttcatcttttggtatttttcgaagttttaatccaaatgccatattatcatatacactcatatgtggataaagagcgtagttttggaataccatagcgatatctcgatcttttggaggaacatcattcattagtttaccatcaattgaaaactcgccttttgaaatatcttcaagtccagctaccattcgtaatgttgtagattttccgcatccagaaggaccgacaaatacaataaattctttatcttgaatgtgtaaattaaaatcagttacagctgttacgttattatcatatattttataaatgttttctaatttaagttctgccatggtatttccccctagaaataattatgcaaacgttttctttgagttcattataaacgaatagattcaaaaaataaataaaaaaataaaacgttttcatttattggagatttattagtggttttcatatgttttcttagaaaaagaacaataaaaattgtaagcgctattttaaattgagatagaatctgttatcattcattaatgaaaacgtttgcgccttaaaaaagagaaaaatgaatgatgaatgaaatggggtagcataatggaaaaacaatggtggaaagaaagtgtagtatatcaaatttatcctcgtagctttatggatagtaatggtgatggtataggagatcttcaagggattatttcaaagctagattacttaaaagagttagggattgatgtgatttggttatcaccagtctatgaatctccaaatgatgataatggttatgatataagcgattattgtaaaattatgaacgagttcggaacaatggaagattgggatgagctattacatgaaatgcatgaacgtaatatgaaacttatgatggacttagttgttaatcatacttcggatgaacataattggtttattgaatcacgtaaatcaaaagataataaatatagagattactatatatggcgccctggaaaagaagggaaagaaccgaacaactggggagctgcttttagtggatctgcatggcagtatgatgaaatgacggatgaatattatttacatctgttttctaaaaaacagccagatttaaattgggataatgaaaaggtaagacaagatgtttatgaaatgatgaagttttggttagaaaaaggaattgatggcttccgtatggatgttattaattttatttctaaagaagagggattaccagctgttgaaacagaagaagaggggtatgtttcaggtcataagcattttatgaacggtccaaacattcataaatatttacatgaaatgaatgaggaagtattatcgcattatgatattatgacggttggtgaaatgcctggtgtaacgacagaagaagcgaaattgtatactggagaagaacgaaaagagttgcaaatggtattccaatttgaacatatggatttagattcaggagaaggtggaaagtgggatgtaaaaccatgctcacttcttactttaaaagagaatttaacaaagtggcaaaaagcattagagcataccggatggaatagcctttattggaataatcatgatcagcctcgcgttgtatctcgttttggtaatgatggaatgtatcgcattgaatcagcaaaaatgttagcgacagttcttcatatgatgaaaggaacgccatatatttatcaaggagaggaaattggaatgacgaacgttcgattccaatcaattgatgaatatcgagatattgaaacgttaaatatgtataaagaaaaagtgatagaccatggtgaagatatagaaaaagtaatggaatctatttatataaagggtcgtgataatgctagaactccgatgcagtggaatgatcagaatcacgctggatttacaaaaggtgaaccttggattactgtaaatcctaactataaagagattaatgtgaaacaagcaatccaagatgaaggttcaattttttattactataagaaattaattgaactacgcaaaaataatgaaatagttgtgtatggatcatatgatttaatattagataatgacccttctatttttgcttatgtaagaacatatggagatgaaaaactacttgtcattgcaaactttactgcggatgaaagtgtatttgaaatgcctaaggatattagttatagtgaatcagagttatttatacacaattacgatgtagaaatcggatcaatagataacattccattacgtccgtatgaagcgatagtgttcaaattgaaataagaaaaagccttatgccatttcgaacttggcataaggcttttttggattaccattttaatatggagaatccatatggaggaagtgtaacttgtaatacacttgcttccgctgaaaattcttcgtttgtataaatgttaattattttcttaccagtaacatgaagagggagtgaaactgtaacttcactattagtagggtttaaaacgaaaaagatagtttcatcctcatatgttttcgtataagaaatataattatgttcatcatttgcttcgatgaattgaaaagtaccatgtcctccaaatgctttatgttgtttacgtaataaaatcaatgtttgtatatgggtaaataatgcatgatcttgttctttagtatcccaaatcatacatttacggcaatcagggtccatgccgccatccataccaatttcatccccgtaataaatacaaggagagccgatgaaagaaagatggaatacatagagcaatttcaacttatttttatctccgttgcatgttgttaaaattcttggagtatcatggctgtctaataaatgaaatgctgcttcatttacattcatagagtaggaatgtagagattctgtaatttgcttcatgaattcacttgctttaatggaatcgttagcaaagtaagaaagtagagcatttgtaacaggatagctcatgacagcatcaaattgatcgccttgtagccacggaagggcatcgtgccaaatttctcccaaaatatatacttcaggatttagtgtctttatttcagttcggaattctctccaaaagttgtgatcgacttcattggcgacatcaaggcgccagccatctatattgaattctcgtacccaataacgtcctacttcaagtaagtattcttttacatctggatgagctgtatttaatttaggcatatacggtgtaaaggcgaaagtatcataatttggaagtggttcggttataatcggaaattcatgaatgtggaaccactctttatatgcggacttctcaccattctctagtacgtcttgaaatttctcgaaaaagtatccactatgattaaacacagcatcgagcattacttttataccgtgcttatgacattcttcaacgagctctttaaaagtttctttcgtcccaaattgtgggtcaatttccatatagtcaattgtgtcatatttatggtttgaatgagctttgaaaataggtgtgaaatatattccggaaatgccaagcttaacaaggtaatcaaggttttgaataacaccagaaaaatctccgccgaaaaaattagttggagttggattcgcacttccccaaggaagggtattttctggattcagcgtactatcgccattagcgaatcgctcagggaaaatctgataccaaatggtgtctttaatccaagatggtgctttgaatacatcatctgcatgaataaatggaaagcagaaaaagttaccaacatcatcatttggaatgctagaaaagaatcctcgctctgcataaataagagtgtctgtttcagattttaattcaaacccataacgtaagcgcttaaattttggttcgattgcaatggaccaataatcaaataatgcagtagaacccgtttttttcatgggtgtacttgctgatatccatttcccgtctttccattcgtaaggatccccgtaaataagatcggcgctttgaatatcatctctcttagtacgtactcggatgtgaattgtttgttcatcataagcgtatgcataattatctttcggcctatgataaatggcttctttaaacatatagaaaatcccccttcaatatctctatacatagtattcccttaagtgtaataataaagcctgtattgcaaacgattgcctttctcgtagctttaatattgcttataagagtagtattcattttatataaagtcaatgtataaagagtataatgacataatttttaaattaatatttgcaaaatgaataaaagaatgtataatgatagacaaatagcgcaaacgttttcatagattgagatattgtttgcgcttcaattaaactattaaatgcaaacgttttcagttactgaggtacatagacaatttagggaggtttttgggatgaagaaagcattatcattattaacggtttcagcattatctattggtatgttatctgcatgtggaccgaaagattcagggaaaaaagaggaaagtaaagcgaaaaaagactatgatcttcttgtttgggaagatgataaaaaaggtgttggtttagaaccagcagtgaaaagctttgaggaaaaatataaagtaaaagtaaaagttgttgaaatgcaaatgacagatcaagtgaagaagttacgccttgatgggccagcggggactggaccagatgttgtaacattgccacacgatcaaatcggaaatgcagtaacagaaggtttactttctgaagtgaaagcagatgatgctgtaaagagtaaatttactaattcatcaatagaagcacagacatataacggaaaattatatggtttaccaaaagcaattgagacaccagtctttatttacaataaaaaactaatgccaaaagcgccagaaacgatggacgagctgtttaacttctcaaaagaatttacgaaagatggcaagtacggatttttagcattaggagataacttctactttgctaatgcattcatggcaggtatgggcggttatgtatttggtgaaaaagatggaaaaccaaatgcaagtgatgttggattaaataatagtggagcagtacaaggtgctgaatatcttcaaaaatggtacaaggaaaaattattcccaaaaggtattatcggtgaatcaggtgggcctgctgctgatggactattcaatgaaggaaaagcagcttctatcatgaatggcccatgggcgttccaagcaatggaaaagaacgggattgattatggcgttgctccaatgccgaaattaccaaatggtcaaccaatgaaaacgtttgttggggttaaaggatggcatgtaacaagtttctctaaacaaaatgatttagctacaaaattcactgagtgggtaacaaatgaagaaaacgcaaaaattcgatttgagaaaacaaaagaaattcctccagtaaaatcagtaatggaagatccaattattaaagataacgaagctgcaaaagcagttgcaacgcaatctgaaaatggaattccaatgccaaacattccagaaatgcaagaagtttggaaaccagctggagatgcgcttcaattagttgttacagataaagaggcaccaaaagcggcgcttgatagtgcagtgaaacaaattaaaggtaatattgaggcaaatcataacaagaaaaaataaggtgaaattcgtgcctctaatatgagaggcacgaattctctcccttccatgtaggaagaaaaaagggggaaggaacatgcaaacatctatggaaccagcaaatgggttaaaccattcaaagcataggaaaatggcaaccatgttatcaatcattccaggcgtgggccaaatgtataataaacaatttgtaaaaggtcttatttttctagtattaacaggttcttttattgtagcctttgctgatttattaaatatgggattatggggtattgtaacgcttggtacagaagttccacgtgaccattctgtctttctattagtagaaggaatcttggcccttatcgttatcgcttttgggctaggcatatatgcatttaacttatatgatgcataccaaaatggaaagaaacgtgatagcggaacaccgttaaattctgtaaaagagcaatatcgtaatttgttagatcaaggttttccttatttaatggtttcaccaggttttctactacttatctttgttgtcgtatttccaatcatcttcgtaattttaattggatttacaaactatgatttatatcattctcctccagctaaattagtagattgggtgggctttaaaaactttattgatattttcactttaccgatgtggagagagacatttgtaagtgtattctcttggactatcatttggacattcgttgcaacaacattacaagttgcacttggtattttcttagcgattatcgtaaatcagcctggtattaaaggaaaggcgattattcgaacaatcttcattttaccgtgggcggttccagcattcgtatctattcttgttttctctggtatgtttaatgaaacattcggagcgattaacaatcaagtattagctttattcggaattgaaaagattgcttggatgacagatccattttgggcgaagattgctttaattatgattcaaacgtggcttgggttcccgtttatctttgcgatgacaacaggtatactgcaatcgattccgggagaattatatgaagcggctacagtagatggagcgacagcttggcaacagtttcgtaaaattacattgccacttgtgttatatgcaacagcaccaatattaattacgcaatatacgtttaactttaataactttagtatcatctatctatttaatggtggaggtcctgctgtagctggacaagacgcaggtggaacggatattttaatttcatggatttataagttaacgatgacttcagcgcagtacggaaaagcagcagctcttacaatgatattatcgttaattgttattacagttgcgttatggcaatttaagagaacaaaatcattccaagaagaggatatgatgtaaatgaatattaaaagacagaagatgttacgtctctcattaagttatttagttattttcgtaatgtgtgccatcattttctatccgttattatggattatgggctcatcgtttaatccaggtgatagtttatctggatcaagtattattccacaaaatgcaacgttagatcattatcgtaagttattagatctagagaatagtaattacttactatggtataaaaacacattaaaagtaagtgttttaacgatgattttctcagtgttagcaattagttttaccgcttatgcattttcgagatatcgttttgttggaagaaaaaatggtttattaacatttttaattctgcaaatgattccaaactttgcagcgttaattgctttatacgtattagctcaattaacaggattaattgatacacaccttgcattaattttaatttatgtaggcggggctattccgatgaatacatggcttatgaaagggtattttgatacgattccgaaagaactggatgaatcagctcgaatggatggagcaggacattttcgtattttttggcaaatcattatgccacttgcaaagccaatcgtagcggttgtagcgttatttactttcattggtccatttacagatttcattttagcgagtattattttgcgaacaccagaaaattatactttagcagttggattatatgaaatggttgcgaagaaattcggtaatgaatttacaacgtttgcagcgggttctgtgttaattgcgatcccaatttcaattttattcctatcactacaaaaatactttatttctggtttaacagctggaggtacaaaaggatgaaaaatgggacattacgtcccatttttcttttcatctccctataaataagtttatagggagatgaaaagagatttgacatcacatgtgaaaagaagtgaaataaatagtatattatagtataggaaaaaatagctatatcccttacaatacatgaagagggagaataggattagttttgcaagatataagaaatgaaagtttatgacttgcaatgagtgcgagataaaatatatgaaaaatggcagagaaatgagaggagggggatttttatgacagttacaattaaagatgtggcgaagcaagcgaatgttgcaccatcaacagtttctcgtgtaattgctgataatccaagtataagtgaaaagacaaagcgccgtgttaggaaagtgatgagtgaattagggtatcatcccaatttaaatgcgagaaatcttgcgaaccaaacgacgaaaacacttggtcttgttatgccaagttctgcaagtaaagcttttcaaaatccatttttcccagaagttataagagggattagttcatttgcacacgtagaaggttatgcgctttacatgtcgacaggtgaaacggaagaagaaatttttaatggtgtcgtaaagatggtacagggacgccaaattggtggcattattcttttatattcaagggagaatgatcggattattcaatatttacatgaacaaaatttcccgtttgttttaataggaaaaccatatgatcgaaaagatgaaattacatatgtagataatgacaattatacagctgcaagagaagtggcagaatatttaatttcattagggcataagcaaatcgcgttcattggtggtggatcagatttacttgtaacgagagatcgtttagccggtatgagtgatgccttgaaattagcagacattgtattaccaaaagaatatattttacattttgatttttcgagggaaagtggtcaacaagctgttgaggaattaatgggactgcagcaaccgccaacggcaattatggcaacggatgacttaattggacttggtgtgttaagtgctctttctaaaaaaggattcgttgtaccgaaagatgtttctattgtaagctttaataatgctttattatcagaaattgcgagccctccactttcgacagttgatgtgaatatttatcagctaggatatgaggcagcaaaagctttagttgataaagtagagaatgcagaatccactgcaaagtgtatcattattcctcataaattactaaaacgtcaaacttgtgatcattatgcataaaaaagctaagagtttaactcttagcttttttcattagaaaggcttctaatcggtcgcagccttcttttaaagtttcgatactatacgcataggacaagcgaaggtagccttcaccgtattcagagaatgctgttccaggaactacagctagtcccgcttctttgacaagatcaagtgcaaaatcaaatgatgaagatgtcaaatgaccaacatatgggaataagtaaaatgcacctgttggcttttcaactgttaatcccatttgagtgagtctattatatacgtaatcacggcgttttttatattggtggcgcatcatttttggtgcgtctttagctgctgttaatgcttcaattgcagcgtattgagcgattgaagtagcacacgttacattgtattgatgaacttttaatatgtgtcctgctaaataacttggtgcaaataaaagtccaacacgccagccagtcatagaatgtgatttagataaaccgttaatgacaattgttttttcacgcatttctgggaaatgagcgatagatgtatgcttttgttcatatacaagctcgctataaatttcatctgaaaggacgaaaatatttttatcttttaaaacatctacaatatcttttagctcttctgttgataaagttacaccggttgggttagaaggatacggtagtacgatacatcttgttttttctgtaatagcatttttaagcgcttcagctgttaaacgaaatccagtttcacgaacatctacaaaaataggcgttgcaccgcataatcgaataataggttcgtagcctggataaataggagcaggtaaaattacttctgttcctggctctaaaatcgttcggaatgcaacatcaattgcttcgctagcaccgattgtaacgatggtttcgttttcaggtgaataatgtaaatcgtagttatcttttacgaagttacaagctgccttacgtaattctagtaaaccagcgttatgtgtatagcttgtatagttttctgtaatagcccgtttagccgcttctttcacgagagaaggtgtagggaaatcgggttgtccaattgttaaagaaatcaaattatcatagttttgaatcatgttagagaactgacggattccagaaatttggatgtccttcactctagggttaatgaattgttccattgtatctccctttcttccgtttgaaaattaagttcattttatcatattttctatgattacgctttgtatatgttatttagaaagagagagaaaagagaaaaaaagccgctataagcgactttttaatatccgtattcccaatctatttcatcttcattccagagtacagaggataccttgccaaggtgaacgactgattcgtttacagcacatgtgcagttttcatctcccgctttatgctgtaactcttcatatactgatttttcaacattttctagaacaaccaaattttcttcttttaaaacaagcgtagtacccgccatatttatcttcctcctactaaagtaatgatcacttatttgtaaacatagatagtatggattatatgctgtattttgctataattgtccgtctaaaaaagtatttttatattttctttgtaatccgtattcattgtatactgcacgaaggaaatttggtacagggtttacaatcatttcgaaaatctgtaacaattattatgagttgttaacaaagaattaacaaatatgttaagaaaaatcaaaattttaaaacaaatacacctataaaatgatataatcatatcaaaatacatataggggatgagaggttatggagcttatccgtgatttattgattcaaattgccatcataattttgccactatttttatatgaagcgattcgtttaaatcgctatcaagaaatgcctccgaagccaaatcgttactttattatgtttttatctagcgttacgctcgttctctccatgacatactctatttgttttggcaatgtgtgtgggtataactttcaccccattccaattgtcagtggttttttatatggtgggattgttggtttaatcccagcggttatttttgttgcatatgaatggttactaaagggaatgagctttcttccagttttagaagtaatatttctattgatagttccgctatttttatcaaagaaatggtctcttttttcaagggataagaaattaattttagcatttatgatttcatcattttatgtgcttgtttctttagtattaggcatgattaatgttcttttggaaacaggatttacaccgtatatttcgcaaatatatagcggatttatatttgcctcgcttatcatggtcatgacaatggtatttcaggtgtatttaactgaatatttaaatgaaaatgcattgctacgtacagagatgcaaaaatcagaaaagcttaatattgtaagtgagttagcagcaagtgtggcacatgaagttcgaaatccactaactgttgttcgtggatttatccaattgctagaaagtacggaagatgtgaagaataaggattatatgcgtcttgtattagctgaattggatcgggcggaacaaattatttcagattacttaaatttagcaaggccgcaaattgagaaaaaagaacacatttgtttatcagcccaattaatagaaatgaccactcttatgtcgtcatttgcagcgatgcaaggtgtatatttacaagttgaaatttcagaaagtctttatacgattggtgataagacaaaattgaagcaagctattatgaatgttgttaaaaatggtattgaagcaattcaaggaaataaaggatatttaaaagtaacagctattcaaaaagatgaaacaatcataataagagttaaagatagtggtgttggtatgacgaaagaacagttagcaaggcttgggcaaccatattattctttaaaagaaaaagggacaggattaggacttatggtaacatttagtattttacaagcgcataatggtacattggaatataagagtgaaagtggaaaaggaactgaagcaattattatattaccagctgtacaaaataaggaataaaagttaccgatggaaggtaactttttattttatattgtttattcatttgttttttcttgtttttctcggctaaataaacttttaaatgattgaaagaagctttgctcttttgaggcagcaaccattctttttgtttcttgaatttctcgaataacttgcataagctgtgcatcacggttactgtctttgttataaatttgactaacaagtttattcattttttcttcctgtttggattctcgtttatacatatgattcattaataagtccatcttttctttttgcaatgcatctgtttgaacggcgtgatcgactaactcttgaagcattttttcttgagagccttcttttacataaacttgttgcatcaattcgtctagtttctcatcctttaaacgattttgtgtaattagagtagaattttgatgaataattgcctcatttaattgagctagcatttcaagttttaacatgaactcctcaaagttacgcccatcttctttttctttcgtttgtatctcttgcttatcttgtataactggtacaggtggggcctctttttcttttaaaataatcggtatcgtttctgaaatatcttcttgtaatgtagcagctctttcgtgtatagatttcaataattttaaatcatcaagtttataaatacgagcatcagctgttttggaaatcatataaccatgttcctctaacagttgactatatttgcgaactatatgttttgggatgcctgttttattcgtgacatctttcgttttataggtagcttccatcatatttcctccccaaaaagtatcgtatatatcatttcaatcttttatgaggacttcctttgaaaaagaatgtcggaaggctattagttttctacagcattagtgaaaaaatgaaaatttttggcggaatggcaaggaataactaaaataatgtctgaaaacatatacaggagaagtttgttataataacggaggaaaagaaactggtagaaacatggaggtatacatgaagcaattaaaaggtattatcatttcaattatcgcaattctgtctattttagtagcagtttatgaagtacttgtgccagaggaaacaagtgtaaagaaaacgaatacgtatgatcaagtgttagaatttccgaaagaacgttatccagagacaggaaaacatattacggatgctataaaagaagggcattcagaagtttgtacaatcgatcgtggtggtgctgcagatagaaggaaattgtcgttagcaccatatccatcaaaaaaagggtatgatcgtgatgaatggccaatggcgatgtgcaaggaaggcggaaaaggagcacatattgaatatataagtccggcggataaccgtggagcaggctcttgggtagggaataagttagataaatacccagatggtacgcgagtaaaatttgaagtgaagtagtagttgtatatttcataatgaaggagaaggggaactatggagttaacgatttcttattcgcaattaatgttgatgaactatgacggtgagcagccttatgtagattggactgatgaagattttgaaagaggttatgctaaggcagatggaactgttatttttgaagcactttctgattatacttgtgaagtgaaagtgaccccagggaaacatattgaaaaagaagaagtagttagaacgattacggttccttttacagttgaaaatgaaagtatcgttataacgagtattctttctaataaatttcaaatacctattccaaatggtgagtatacagttgtattacaagcaattcctcttgaagagccaacggatgatgaattatataaaatacaatatgaattcttttttgaaagtaaagaataaaaaatgggttatcctgagaaaaggataacccatttttgttatgcgtttgtttttaaaagggaacgagcatctttcgctgcttgcaccatatgttctaaagctggaataacttcttctgttcttctcgtttttaaaccacaatcgggattaatccagaaatatttaggatcacatacttctaaagattgttctacgattttatacatttcatctttactcggtacacgtgggctatgaatatcatatacacctaggccaatgcctttttcatatgttgtatgttttaatgtatcaataaattctccgtgacttcttgatgtttcgatagaaattacatctgcatctaatgcgcgaatcgcgtcaacaatatcttcgaagttactgtaacacatatgagtatgaatttgtgtttcatttgctacagaagaagttgctaaaaggaaggattgtactgcccatgtaatataagcatcccaatctttttcttttagtggcattccttcacgaagtgcgggctcatcgacttggattactctaattccagaagattcaagtagttcaatttcgtgacgaagagctagtgcaatttgatacgaaacttcttttcttggaatatcatttcgaacgaaagaccaatttaaaattgtaacaggtccggttaacattccttttacaactttctctgttaagctttgtgcataaactgtttccttaatagtcatgccgttaataaaggctacatcaccataaataacaggtggttttacgcagcgggaaccgtatgattgtacccaaccgtttttagtgaatgagaaaccagcaaggcgctcaccaaaatattcgaccatgtcagttctttcaaattcaccatgtacaagtacatcaagcccaatttcttcttggtaacgaatccatttttctgtctctttttcaataaattgttcatattggtcatttgaaataacaccgttacgccattcttttcgcgtttgacgaacttcagttgtttgcgggaagctaccaatagtcgttgttggtaatagcggtaactctagagcaacttgttgtaattcgtatcgtttttcaaatggaagagaacgtgaaaaatcttcttcttttagtgctgttcgtgctgctttgacatcttctcggttacgtgcagcagatgaacgaattgtatgatgtacgtttcgatatgtttccagctcattactaatgctttctgtaccttgagtgagagcggaatgaataagaactaactcttctaatttttgatttgcaaatgctaacgcatcaaacagctcagtcgataagtgagtttcttctgttttatcgattggtgtatgcaataagctacaagaaggctgaacgatgatatctttcgtttggacttgtttttgtaacgttgtaaataactcaagaacttcatcaaggtcagctctccaaatgttacggccatctatacaaccgacagctaaagttttatcagctgggaatccatattttgaaatagcatttagattaccttctttaccatgaatgaaatctaatccaataccggataccgggaatgtaataatttcttcatagttttcttctacgctatcaaaatatgtttgtaaaagaagagtcgcatttggaacttctttacgaatagcttcataaatttcttttgcttgttgaacttcttttttagttaaagaagcgaaaatcggttcatcaacttgaatggcttgtgccccagctgcatgtagttctgaaagcagttgtacataaggtgcaactaactgttttaaaatgttaggaaattgttcttgtgtatagcctttagctaattttaagaaagtatatggtcctaaaataacaggctttccatctactcctaattcttgttttgcctcttcgtataagcgaagtgggcgattatcttttaaagagatttgtaatccctcttcatattcaggaacgatatagtgatagtttgtgttaaaccattttgtcatttcggaagctacgtgatctttagagccacgcgccattgcgaaatatacatcaaggtaagatgtaaactcagaaaaacgtgatggaataaatcctagcatataggcagtatccaaaacgtgatcataatatgtaaagtcgccaattggaatgagttcaatccctttttcttgctgtacttttacgtgttgaaggcgaatttctttcattgttgttaaaaattgttcttcatcgattttattggaccaaaaagcttccaatgtttttttccactctcgttgtagtccgatacgtggataacctaagttacttgtttgaattgccattttaaattcctccctaattgaaagtaagcatttccgtttactaggaaatacctataacaaaaagtacaaagacatagaaaataagccttcctttttgttttaacacctcatcatcatccgtgaatctatcagtgttgttaaaacaggcaggtctcctgacttatgcttcatataatttctttcaccttcccgttttcacagtggcaccaaaaagaaatctcagcatttacagtggcgggaccgtgttggagtttcaccaagcttcccttttaaacacgaaacgaaactttcgtgtacctattttccttttgaaaggaatttaacaagcgatatgatattgaaacaaattctaacacaatttttggaattttgtctactgttttgaaataagaaaattcaaaagtttttatttcttattattatgacttttcatcctggattaactaataatattacagtataaaaagagaaattgagctatgaaagaagtagggatgccttctttcatagctcaattttcatctatagcaacttctgaaagtcggcctgctatagcatctttaaggagggtgtttagccattgtaactcaactgtaatatgctcaattacactttgcaaaatatatagttgtgcacgtggaacctttcctttattacaatcatatatcgtttgcatagtatgtaaatattgaagagtatcgtttttctttttttctaaaataggaactaattcgtgatcattgctaaagtgagcgaaagataaggccgaataaataggtttatatatttggtttttggcttcgaattgttttaatagtaaagtgtggaatagttttttgccttcttctgttatatgaaaaatcgttttgtcaggtcgatttgtgtctctaattacatttgtaatatgaattgcgccttgcttttctaattgctcgaaggcgtaataaagtgatcctttagcatatttaatataacaatccatttgtcgttctttcataatatgctgcacttcatatggatgtttatctccttcgagtagcaagccgagaatgactaatttcatgctcatgctgtctcaactcctgtatataaaaactttatccagtaagatccccacccaaaaattcagcggaagcaaagaagttaggtggggattaactgcccgtaaaagcccgattggtgagggctaataatcagtgggggatgaacaccccccccactgattaaagtttcactttatacatattataaacggcatatcctttttcataaaggaatatgccgcttcttttttatattaactaacttgcttttgtttttctttctttttagggcctgtaaagaggcgttcatttcccataagtaaaatacaaataatacttagtacagccgggatgagtgcccagaagaatgtattcgcaatagatgtagcgagagcttctttaatacccgctaatatttcagcaggaatttttgcggtagcgcctggtgataataagaaacttgtgtctccgccttttggagctaattttgctagttcagggggaaatacagagtttagtttatctgtaaaaatatgattttgaattgtaccgaaaatcgttacaccaagagtcataccgagtgatcggaagaatgagtttgttgatgtcgccgaaccacggtcccgcatttccaacttgtgaatagaagacatacttaatactgagaatgagaaaccaacaccaagcccagcgagaatcataaatagtgttacgagtaaacgaggtgtgtccattgttaaagtacttaataaataaataccaagaacgaagaagaaaccagataccatcataatgttacgatagcttgttcgagacgctaattgtcctccggtttgacttccaattacagaaccaaccatcattggtgttaaaattaatccagcattagaggcggaacctccaagaacgccttgaatgaagattggaatataaactgtacagataataaaagcggcaccatagaaaaaggcaactccttgactagctgcgaataaaggttttttaaatagatggaacgaaataataggctcggttgcttttcgttctacaaagaagaaaataataagcgtaataactactgttgtaaataagccaataattacagtagaattccaggcatattctttaccaccaagttctaatgcgaacattaagcaaacgatacttatgacaagtgtaatagcaccagcccaatcaattttttgttttctaaattctagagactcactgtagtatttagtaatgaagaaaaaggagataagtcctaatggaatattaatatagaagacccaatgccaacttatatagtctgtaatataagcacctaataaaggaccgaatacactagatgtcccgaaaacagcaccgaatagtcctgtcatctttccgcgtttttctggtgggaagatatcgtacataattgtgaaggcgataggcataagggcaccaccaccgataccttgaatagctctataaatacttaattgctcaatacttgaagctgttccgcagagcgcagaaccgaataagaaaagaatgaggccacctatataaaaacgtttccgtccgtacatatcagaaagtttcccgaagataggcatccctgccattgttgctaccatataagctgatgtgacccaaacaaacttatcaaatcctcctaggtctccaacgattgttgccattgcggttgcaacgattgtattatccattgcggccattaatataccaagcagtaaaccagcaacaacaaattttgttttgttggcgtctttttttaatggttgagtttccaaatataaccctcctttagaaataagtaaactatattaagttttgagtgcagtggataaaaaattttaaatgtatagttgattttaattccttttccataagtgcactgatatgccataaagaatattatagtcaaatttgactataaggcaaactttttcttccgtcaaaatattctttcgtatgagtagagaacgagtgagccatactgaatattgctataaaggaaatgaagtaaattgtaaaaaaatttcataaagaacaccttctgttaatagatgaaaaatggttttttcttcatattgtcgaataggataaaaggaagagaaatattaaacattgcttgtagcaagctttagtgatttggggaattcattgtgtgtatgttacatctgaaatgaggtgaatatatattatgaaaatatggggacgaatttcggatacaggaaagtattcaataccgctacaaccagtattgtggattgacggatcgaaaaaggaaaacgaatttcctcaagtagccgttacattacaaattggtagtatgtatacagaacagttttcgtatgaattgacctacgatgtaaacgacatacttattatgcgaattgaagtggaaaataaaggggtagaaatgatttcgagagttgttgtaagtcatatgattcgagattactttgcttatattcctaattctttaaaagttgataaggggataagtgagtttttattccagcttgttagatggcgaattgatgatttgttaccgaatgagaaggtggaactacgttgtaaaataaaagctaataaagataaagctcttaaacaaacattctttcaggctacatatacatttcaagataaagagatatcatatggcccactgcaaacaaatgaagttgttgtgcgtcaatgataaaaaggaacctgtacaaaaggttccttttttagtgaaggttgtgttttttgagtattttcttttgctccattcctttttttcctacatagttatttttgtagccaaagtatagaataaataaaaatgaaacaacattaacaatagcgtcgatttgatcgtttgtaataaagtgtatcccgaaagaggtaaataataattttaatgataatagaaaaccagctagtaaacgcatagcatctgatagattctctttttgtagcatatagattactcctttctataaaagttatatattatatatatgaaatagagtagaaaaggtatacaagcttaagcagaaatgtacattgcatatgtacattttttattttgtagaaaaacattattgatatagaaacatatattggtataaaagggggaaaagtatgaaacataaagggaaaattagtggattattgcttggcaatactgtggcagttacagaatggattgcacttcaggatgtaattgcaaaactggattcacgatcattttataccgtctttattatttatatattgcaaatgatactaagttattattttggacattggtacgataaaagagcgaacgagcgtatgggtatggaagtaggaggaatggcaagcaatgattttgttgttgatttttttgggaaagtagctgctttatctgaaagagattctcgtaatattacagtgtacattctttctgtaaaagaatgggaaggattaaaagacacgttgcaagaaaaaaagttgggagtgttagtacaaaaattagagagtaccattgtaaaaacaattcggaagggcgatgttgttacaaagtgggatgaaaataagtacgttattgtagcaattgataatggccatgaaacatcaacaataacaaaacgattaatgaaaaatattgaaagtgaaatagaaggtgatttactcagtgtcactcttttatttggagcagctagctatccagtagaaggaaaaacgtttgaagaactgttgagaaagtcgcaaaatcaattgtaccagtatagaaatttgcaagaaaatgagtgaagctttgatttgaagatatatgataggaagatgttttatttgtaacatttttttgacttttattacaaaaaaacgccacgtttgtaataaaagtctttaaaaatatatgaaataagcatataattatgatggtagtgtcaatgcaatttgcacagtgtgttttattttaaaagtgtagaggaaagcaagctctacacttttcctttttaggaaatgaaaagaatatttgtaagttgttgcgagatatcgattgtactgtgtaaaatgaacaaagagattaattgatagaaagctggaaagggaatgatagacgtgagagcggagcgatcaccttttatcaggtgaactattatagtcttattaagactgaggtgaaattccgtggacattaaagtaatacatagtgtgaacaggccttaaaaaacacgaagtagtatacttaaagatggatatggaattgctaaataattcaaaaagaataatgtaatatcaagtaataatttgtacaaacaatattaatgatcttcgtaaaaaagatgcgagtgtatagaacaattacatattttataacttttttatattacacgatggtcgtttataagtaggaggaagagatgttgaaatatagtaaattagcaattgtaactgcattatcaatgattttattagccggttgtttcggtccgaaaccagaagaagaattatatgtagcgtttgaaaacgctgctaaacaagaaaaaacaatgtttgaagatgcaaaaaaacttgagactttagagaaagaaggacaagaattatataaccagattgttcaagaaggaaaagataataatcaaactgttaaagaaaaactgaatcaagcagtgaaaaatacaactgaacgagaaaaagtgcttgcaaaagaaaaagaagttttaaataaagcgcaagaagaagtgaagtcagctgataagtatgtgaagaaaattgaagataagaaattgaaagatcaagctgataaagtgaaaagcacgtatgagaaacgacacgattcatttaataaaatgtatgacagctatgacaaatctttaaaacaagaaaaagagttatatacaatgttacaagataaaggtactaaattaaaagatattagtgaaaaagtaaaagtagtaaatcaatcttataaggatattgagtcagaaaaagataaatttaatgaattcacaaagtcttataatacagaaaaagtagctttttataaacaagcaaatattaaaattaaagaagagaaaaaataaaacagtttggcctacacttggccaaactgttttatttttttgtataagtacgactataccatggaacaggttcacttaattttttttcttgttttaatgcttcaggaccaatataatcttgaattgttttttttgccactgttaaagataaggttgttttcggatttcgataggaggattcaagatgaccaagatgcggtagaattcgaaaatcttctttcgtaggagggatgtggaaaaaataatcgcctaaacgtataaggacatcagattgttgttggctaaaacgtgggtttctagaaaaatgtaatccttctttaattgcttttttttcagcaatcaaacgttctaaagctgtcttttttaaccagtataaatatttaggattagtagctgctttagcatgacgattcacaacgaaaatagattgagctagtcgattaatagaatgttggttttgtaattgagattgtggttgtgaaggtttcatattgaatctcctttcaatttttcattattataccataaataaaataggtatttattatacgcaaaaagtgattgtatatattttcaatattaaagcaatattgttacaaaaaacaactattttgtataatagtaatagaatatgttttttaaatttgataatgaaagagtgagaagtttgaaagaaatattaaaacaacagtatgccattatagatattggatctaatacaatgcgtttagttatttatgaaaagcaaaatggaggtttttataaagagattgaaaatacgaaagttgttgctaggttaaggaattacttaattgatggtgtgttgaatgaagagggaatagaagtattattacagacattatttcaatttcaagaaagtacaagattccatcagttgcatcatgtactttgtgttgcaacagcaacaattagacagtcggagaatcaagaggaaattaaaaagcttgttgaaggacaaacggactttactcttagagtattatcagagtatgaggaagcgcgttacggatacttggcggttatgaattctacatcgttttcagaaggaataacggtagatatcggcgggggaagtacagaagttacatactttagaaatagagagattttagagtaccatagttttccatttggggcactttctttaaagcaacaatttattaaaggggatattcctactaaagatgagttagagggaatgcaacagtatttagagtttcaatttcgaacgttaccatggttaatcaataagaaattacctcttattgcaattggtggtagtgctaggaacttagtgaaaatccatcaaaatttaatatgttatcctatagcaggattacatttatacaagatgaaagaagaagatattgaaagtgtaaaagatgaattggaaaaattgtcgttcatagaacttcagaaattggaaggattggcaaaagatcgagcagatacgattattccagcggttgaagtatttcatacacttgttaatgttatagaggcaccggcatttgtattaagtagaaaagggttaagagaaggtgttttctatgaagagttgacaaaagatttggggatttcatattatccgaacgtagttgaagaaagtctgcatttactatcacatgaatacgaaatggacatggaatttgttattcagcttattaaacatggaagactaatttgcaaacaacttgaggaaatagggcttatttctatgtcagtaaaagactgggaagtgttccatcaagcagcgaaagtatttaatataggcaaatatatagacgaagaagcaagccgtttacatacgttttatttattagcgaataagacaattgatggcatgatgcataaagatcgagtaaggctagcgcttattgcatcgtataaatcaaaaatgttatttaaacaacatttatctccatttgaaggttggtttgataaaagcgaacaaaaaaaaatacgcctgttaggagctgttttacaattttcagctactttaaatgtaaggcaacgatcgcttattgataccatatctataacagaaaacgaagaaggattaacatttaaagctttatgtgaaaaatcggcattagcggaaaaagtgcaggctgaaaaacaaaaaaaacagttagaaagagtattaaaaacgaatattaacttgttatttgaactaaaacattaggttgtacggatgtctttacaaaaaatttacactttataatattgtaatttgctaaaataaaagtaactaaattatagtaaaaaagtttcaaggggaagtgtgaagagaatggaattattgaaggggaatgcagtaaatttaaatgatacagcttattacaataatcgagagttaagttggttagcatttaatgaacgtgtcttacaagaagcgcaagatgcaaataatccacttttggaaagattgaaatttattagtatttttagttcgaatttagatgaattttttatggtacgtgtagcgggattaaaggatcaagtgagtgctggatttaatcagccagaaaataaagctggcttaacaccaaaaaagcaattaaataaaattgcgatgaaagcccatgcactaatgacagtacaatatgatacatttaaaaattatgtattaccagcgcttgagttagagggaattgaacgtttaacattcaatgatttgacgaaagagcagcgagaatttatagaagagtattttgatgagcaaatttttccggtgttaactcctgtagctatagatgcatatcgcccatttccaatgttattaaacaaaagtttgaatttggctactcttttatatgatgagaagcaagcggaagaggaaaacaggacgaagttaggaattgtgcaagttccttcattacttgagcgcttcataattttaccgagcgaagggcaaaagcataaatttattttattagaagacgtaattagtagctttactcataaattatttacgggatatacagtatcatctgttactcgtttccgtattacacgcaatgcagatttaacgattcatgaagaaggtgcgagagatttattaaaggtaattgaaaaagaattaaaaaagcgtaagtggggggctgctgttcgtttagaagttgggaaagaacacattgatgaaagagtactagcgttattatatgaggttctggaagtaaaagatgaagatgtatatataatggatggtccattagatttaacatgtttgttttctttatataaaaaactagctcctttatatgaacatcttgtatatccggctcttattccgcaaccacctcaagatttaggtgatgaagaagatgtatttgaaaaagcaattgagcatgatattttattacatcatccttttgaatcatttcagccggtagttgattttgtccgtgatgcggcggacgatccgaatgtacttgcgattaaacaaacgttatatcgtgtaagtggtgattcaccgattattcaggcgttaaagatagcggctgaaaagggaaaacaagtgacagtattagttgaattaaaggcaagatttgatgaagaaaacaatgttcattgggctaaagaattggaacaggcaggctgtcatgttatttacggtgtaagtcacttgaaaacacatagtaaaattacattagttgtaagaagaaaaaacggaaaaatcgaaaggttcgtacatctcggaactggaaactataatgatgcaacagcgaagttatatactgattttggatatattacatcaagaaaagactttggggttgatgcaaccaatttctttaattatttaagtggttatacaacaaagccacattttcatcatttatcggttgctccatttgatataagagagcaatttatagatttaatagatgaagaaatccgttatcataggcaatatggaaatggatatattatcgctaagatgaattcattaacagataaaccattaattaaaaaaatgtacgaagcatcacaagctggagtaaaggtagagcttattgttcgagggacatgttgtttaagacctggcattccaaatgtaagtgaaaatattcgtgtagttagtgttgttggaagatacttagagcatagccgtatttattatttccatcataatggggaggagaaaatatatttatcttcagctgatttgatgacgcgaaatatggagaagcgagtggaaatatctttcccgatattagatattgaaatgaaggcacgaattaaggcgattttacagcttacattagctgataatgtgaaaacacgtgaacaaaataaagatggtgattactattatgttattaatagtagtacagaagaaattgatagccaagtgaagttgtttaagatggcatatcaaaatacagacgctgaataatgaaaaaagtaaaaacctcttatgtcaataagaggtttttacttttttctactcatatgctccaaaaatggaagaatgagtagaaacaatagttttattataagcgtgtaatgagatggctcgttgagagaataatatttgaaagaatcgttattttaacttagtaatagtatggttgctgacatggtccaccgtaacaaggataaggtgctggcggcgggaaaggtggtggataaggtggataaaatggtcgagggccgaaagctaatgctccgccgagcaatccaccagcaattccagctagaaagggaacgccaaaaaacgggaagaagcgtgagtcgcctactggaccaataggtgctgaacggactggaattggttgataatatggatacatgaacatacctcctttattggactcacttttatcatatggtaaacaaaacgtggatgagcgcgtacaagaaaggatatgtaagaaaataggcgaattattacgaatgttggagtgtgaaaattgtgatttcaggttttgacataaagcgaaatgggacacgtgttcttcccaggcctcgattgacatagagagttaaatcctgaattgtatagaagccttcaatatagtctttggcgagtgaaggtgtaataatagctcctaaaaaaggaatttgtacttgtccgccgtgactatgaccagaaagttgcaagttgattggatatttagaaacttggggcgcgatatctggttcgtgaacaagaacaatgttataagtactttgccgtgcatgctctaatgttttctctatttttggtttgcctaatagtatatcatcgagaccgaaaatagaaatttcactattatccattagacgaattcttttttcactattgagcaatagctcaaatcctgattcacgcatgatgtgctcatagtattcagttccatatccaccgtgatcatggttaccataaatagcgaatttaccaaagggggcttgtatattttttaaaatggatgcaacgaaaggagtgtcagtatacgtttgataattatcaatgagatctccggtaaaaaggacaatatctggatttacagcattaattttagaaacaactttagataaatgttgaagcgagaaatagtatccgagatgtaaatcgctgaattgaagaattttcataccatgaaaactttttgggatgagttgtgattttaatgtgtgctgtgtaaaagaaatgaaatggggctctatatatttagcatagtagtatccgatgctactggttataaatgaatagagacaagtgcgcataccaatttttaaaaaatttcttcttgtaatgtgcttcataaaaatatgagtatacctcaatgttttcattccatttataggctactcaaatctcctttcagtttatttaaaatatactttacataataaaaagtagtatagattacgaaaaaaatgaataaaaagaaagttctttacgttaaaatatcagaaaagtttaaaaatataaagatttctattaaataaagtgataaaatgaatgtgtattcattttttggaggggatgtatgtgaaagaaaaggtagttattataacaggtggatcgagtggaatgggaaaaggaatggcgactcgttttgcaaaagaaggggcacgagttgttattacaggacgtacaaaggaaaaactagaggaaacaaagttggaaattgaacaatttccagggcaagtattacctgtacaaatggatgtaagaaatacggatgacattcagaaaatgattgaacagattgatgagaagtttggtagaattgatgttttaataaataatgcagctggaaactttatttgtccagcagaagatttatctgtgaatggctggaattcagtcattaatattgtattaaacggtacattttactgtagccatgctgtcggaaaatattggattgaaaaaggtataaaagggaatatcattaacatggtagcaacatatgcatgggatgctggtccaggagttattcattcggctgcagcgaaggcaggagtattagcgatgacgaagacgctcgctgttgagtggggacgtaaatatggaatacgagttaacgctatcgcgccaggaccaattgaacgtacgggcggtgctgataaattatggatttcagaagaaatggctaaacggacgatacaaagtgttccgcttggaaggctgggtacgccagaagaaatcgctggtctagcttattatttatgttcagatgaagctgcgtacataaatggaacttgcatgacaatggatggaggacaacatttacatcaatatccattttaaaagggataaaaaatgaatgtttgattcatttttttatggttaaatgtgacggaattgtgacatatgaaagaaaagtgtttacaagaggtcatatatacgttatatttaagacctcttttttcttcatagtagaattgctaattccccttagcattttacccctctaatcccttcaggaaaactgaagggattttttattatttttccgtaaatatcatgttataatttttgaaaagtaaagggagggaagcacgttgatagatgcattagatgtaatgagtaacttggataaagtccttccttattatcaagctatttttagtgctgatgagcatactgtaattggatacgaagtagtaggacgtattcaaacagaagagggcatacaaagtttagcttctttctttcacgatgattcgattccaagtgaatttcaactggaagcggataatattatagtagaaaaagctttaaatcgttatttagaaagcgatcaaaaattattattatttatacatcggaatgctaatgtattaatgaatgatgatgatgaaagcttgcttcaacttttattgaggtatgaagaacaaggtttaaatttaaaacaaattgttttagagattacagagcatgaatgtaaagaagatatagagcaatttaatcatttgcttatgtattatcgtacatatggtattcaaatttcgattaataaagtcggaacgggcacaagtaatttagagcgtattagcgtgttagcacctgatattttaaaagtagatttaacgaacttaaggcaaacagcacttttacaatcttatcaagatattttatattctttatcattacttgctagaagaattggtgcaactttgttatatgaagaaatagatgctttttatcaactgcaatatgcttggaagaacggcggaagatattatcaaggtaattatttgaaagaatgtttacctgattttattgaaacgaatgttttgaaagagcgactaggtaatgaatgtcatcagtttattcagcatgaaaagaagaagttacaaaaaatttataatttaacagagatgttacgcgatcgcattggcgatgttttatcaaaacaaaaaaagaatgaagatataaatgattggttattacaatttagtcaaagtgtatcacagtgtagttttcgtatatttatttgtaatgaagatggtttccaacaatcaggaaatgttatgaaaaaagatggagaatggattgtgatgccggattattatatgaagaactggagttggcgcccgtattttctcgagaatatcatgaaaatgcgttttgagaataaggcgaggctttcagatttatatgcagatattgaaacgggagaaatggtacgaacattttctttcccgattgatgatgacaactttttatttatagatttatcttatgaatatttatatgaagaagatgttttattttaatgcacgaagagattcgtgcattttttgtttgtttttatcataaattggtaatagtgaaaatggtgatgaaaatgctgtctatcgttgtaaagattttacgaacgaaatctgtcctgtctttgcataatcattgttacaatgaatactacaaagacaagttcttttaaaaggaaggtgaaaaaatgaggaaatatggaatatggcttgttctatttgtatgtgttgcctttctagttggttatagtgttacgactgttttaggaaaagaggaagtggaagtcgatcggaaagaagtatttacaacgatacaaaaaggctatgaaacccagttttcaattcgtgggaagcatttgccgatgaataagatgatagagacgttatcaccgtattttacagataatttccttcaagtatttacagatgaaaatagcagaagtgataaacaaagtggtgaatatttacttccggcaaaagaagcaccgttttcttttaattcagaaacgaaaatgtcgtatgatgaagaacataaaaatttatatgtatatgagcggacaaaaagtggacagtatcaaattgtaacattgaaaagggatcaagataaatggaagctagcaggatatcatgaaagtcaggaacttttaactgaaataaaaaggttgcaacaattataaagtgaaacttttaatcagtgggagggattactcttccatctaacttctttgctgtagctaaatttggggtaggagttttactacccacaaatagcgggataagaataggaataggtatttacctattcctattctatattgagtagttgttgtaacttttcaatttgaaaccctgcaactacttcgccatcaattacgactgttggagttgaataagaatcatagtcgtataaaagacgattgcgagcagcagcgtctttttttacgtcaaattcttcatatgcaacgttattatgcttcaaaaattctttcacaataacacagggcggacaatcgggttgtgtataaacctcaatttttttcattgttattcctccttttttctgttttttattatattcttccagtataaaaaccgcaataaagaaggggaaatatgttctttctgttttttccttcgcatttcgacaaatttttagttgagtttctggccaataacctttatcctagagtgtggaacattttttctgttatgacggatagaatgagtatagctgtaaaacctattggtaggaagatcagagaaaggagagatttcatgtctctactccaaggaattttaactcgacttgttagtctacaagaacaagctgaaagcggtgaagtagcacaacgctattttgaagtgaacggtgagcgcaaatgtagcgtgaaatttttcgataaaagtgaaatgtatgagttagaagtgtatcaacaaggtgaaaaacctcaagtgtatcaattcgataatatcgacatggttgcaattgagatttacgatatcatttcttgatacatataaaaaaggtactgccatgtggcagtaccttttttagttctattactttctagtggaatgtatagaagttttttatttttcctacaatggtattaaaatgaaattttaatccgtgcaagtttgcttatccatgtggaaaatgagtcccgtcaaccgggtgaatatgtgaagctaaacttctcacaatcgctgggttctgcaaatagcgggagaaatataactaggaggttatcgtatggaacgtttaccagttgtgatttgtcctaattgtcaaagttctgctgagattattcatgtattaacggctcaatctaatcaaaatgtaatttatacgtgccaagtttgtcactttgtaattcgaaatattgaaacgaataaaggataggaagttataattttagtttttgtcccatacaatgagaatacgaaaagtctgtctaattgaaaggacgtgactctgtggacggtgcacataaattttacaatgtttcagagagacatttaaattttgatatggtctttaaccgtatttgtagtttcattgaaaaggatccgcgaaatttatatcgattatccattgggacagactcacaagcgcatcaaaaggatacgaggtttattacagcaatccatattcatcgtgttggaaaaggtgcctggggctgtttacaccatagatcagtaaaagataagccggcaaccttacgtgagaaaatatatttagaaacgcagtttagtcaagaaatcgcatgtctatttacgcctactcatatacaaacaatatgggagttattgcatccttatgctcaagatggggctggattcataatggaaattcatttagacattgggaatgatggtttaacaaaagaatttattttagatatgacagaaaaaattcgagcgatgggattaactgcaaaaattaagccagatgcttatgcggcgtttagctatgcaaatcgatatacgaaatgattttttttgtatgtatacgattgctacatatcttttaataaaaactgaatattacatctattaaataggttgaattttttatataataagagtaacgatgcgagtgtaaggagaggggtatatgcaaagggaagttgttttaacgaaggaagaagaaagtttactactagatattttatttcagcaaaattacgcaagtgaaattttagctgtggaacttacagatattgagaatggtttgaaacagacagatgtgatgcaatataaaaaaatcacaaggttattttacagattaaaaaataaagggtattaagcgctaccggaatggtagtcttttttttgtgctgtatgctaaaatagctgtgtgattgtatttttattgaaataaatttaggacaaaataataatatgaaaacgctgtcataaaatgtgaatagagttgtgaacataagcaggaaaaagggaaaatgggggatgtaatatgattagtattccgaaagacgaatttcaacaaattcttgtgaaggatttaatgatttcatcggaaaaagtagctcatgtccaaattggaaatagtttagaacatgctttactcgttcttgtgaaatctggatattcggcgatacctgtcttagatccaatgtataaactacatggtttgattagtactgccatgatattagatggtatgttaggattagaacgtattgagtttgaaagactcgatgatatgaaagtagagcaggtgatgaaagaagatatacctgttcttaaattagacgattcatttgcaaaagctttagaaatgacaattgatcatccttttatttgcgctgttaatgaagaaggctattttgaggggattttaacacgtcgggctattttaaaattgttgaataagaaagtaaggcaacataatcgataacgtaagaaaagtgacttcatagaaacgaagaagtcactttttttttcgtgcatatcacttgtgtatgtattatatttaaaaagacataaaacataaggaaagtttgcgctggacaattgtattttctgaatgaaagcattcgggtaaattaaggatgaaaagcttattgaaataaggtgtatggaagctaaggaaagagggagaaagttgcaaattgatgattttcaaatgatggttgtgttagctcaggaatcaaatatgagaaaagcggcggaacgtttatttgtttcccaacctgcgctgagtcaacgattacaatctatggagaaacaatggggaatgaagttttttattcgctcacaaaaaggattgacaattacacctgaaggggaaaaagttgcaaattatgctaaagaaatgttgcaaagggaagaagatataaaaagtgagctagctgttttcagaacggaaactcatggaacgttaaaaatagctgttgcatcagttattggtcaatattggctccctcctgttttgaaaaagtttgtgcataaatatccttctgtcaagatatcgctgtttactggatggagtagtgaagtgcaaaagcagttttatgaaggagacgttcatgttgctatactgaggggaacacaagaatataaaggtcagaagcaacaattatttgaagatgaactgtatttagttgataaagaaataaaagatatttcgatgttaaaagaaacaaataggccgttcattcaatttaaaagtgattcgacttattatggacaaatacaaaattggtggtatggtttattttctaatccgcctaagcgaacgattgtagttgaccaaattgaaacatgtaaacaacttgttttaaatggtataggttatgcccttttaccttctactgttttaaaggaagtacaggaaaatatgtataaaacacctgttcaactgacgagagaaacatggttgttaacaagtgactcggcaaggcagttgaagcaagtacaagcatttttagaaattatagaagaaattcaaagggaaaaataagattattatcttgctactcgctctttcgtttggtagagtaacattataaatggatttaggaggcaacaagaatgaaaatgatggacgctaacgaaattatttcgtttattcaaaaaagtgaaaagaaaactcctgtaaaggtatacataaaaggggatttaaaagaagtaacattccctgaaacagtacaagcatttgtgaataaaaagtcaggtgtattattcggagaatggtctgaaattaagacaattcttgatgagaataataagcacatcgttgactacgttgtagaaaacgatcgtcgtaattctgcaatcccgatgcttgatttaaaaggtattaaagctcgcatcgagccaggtgctattattcgtgaccatgttgaaattggtgacaacgctgtaattatgatgaatgcaacaattaacattggtgctgtaattggtgaaggttctatgatcgacatgaacgcagtacttggtggacgtgcaacagtcggtaaaaactgtcacgtaggtgcaggtgctgtacttgcaggtgttattgagccaccttctgcaaaaccagttatcgttgaagatgatgtagtaatcggtgcaaacgtggttgttttagagggtgttacagtagggaaaggtgcagtcgtagcagcaggagctgttgtaacagaagatgtgcctccatacacagttgttgcaggtactccagcacgtgtaattaaagaaattgatgagaagacaaaagcaaaaacagaaattaaacaagagcttcgtcaattaaacccagagaaataaaaagtaaaaaaagcgtaagagcgtaaatgggctcttacgctttttatagatagaggtgcaaaaatgacagtaagcaaatttatccaaattcgtagagatttacatagaattccagaaatcggatttaaggaatggaaaacacaacagtatattttagattatataggaacactttctcatgaatttgtggaagtgaagacatggaaaacgggtgtaatcgttaaagtaaatggaaaaaatcccgaaaaaataataggttatcgtgcagatatagacggtttaccaattacagaggaaactggatacgagtttgcttctattcatgaaggaatgatgcatgcatgtggccatgatgtacatacaacaatcggtttaggccttctaacgaaagctgtgagcgaaagaatagatgatgaccttgtatttctattccagccagcagaagaaggaccaggcggtgctcttcctatgttagaaagtgaagagttaaaagaatggaaaccaaatataattcttggtcttcatattgcaccagaatacgctgtggggacaattgcaacgaaagaaggactgttatttgccaatacttcagaattatatattgatttaaaagggaaaggtggccatgctgcctatccgcatactgcaaatgacatgattgttgcagcgagccaccttgttacacagcttcaatccgttattagtcgcaatgtgaatccacttgatagtgcagtaattacaatcgggaaaattacaggtggtacggttcaaaatattattgcagaaaaatctcgtttagaaggaacgattcgaacattatcagtggaatcaatgaagcgtgtgaaaagcagaattgagtcaattgttgcaggtatcgaagcttctttccagtgtgaggcgattatagattacggagcaatgtatcatcaagtatataaccatgaagagttaacgagagagtttatggaatttgtacataaacaaactgatatgaatgttattacatgtactgaggcaatgacgggtgaagattttggttatatgcttcgagaaatccctggatttatgttttggcttggagtaaattcagaatatggtttacatcatgcaaaattaaaaccagacgaagaagtgattgaaaaggcaatcacatttttaagccaatatgtaaagtggaaagggaatagaaaataaaacttccgctctcttgaaggttccaaaaaactttttgttctgaggtgtaagtaacgctcgtatagattgattttagacatttacatacaaatggaagaattaaagttaattgtactgttttaataatgagcagggggtttagccactgctcattattaattatttgactaacttatatatgtttacttttagtatgaaaagtgtgtaaaatcaatgtgaaacatagaaaaaagggtggggaattacgtgcaaattagcagtgcgattttatgtttcgtcttatatgcgtatgttattattgcggcggtttattttgggataagtttttatgcctatcgtctagtagataataatgaatatgacgaaacatacaaatgggtgaagagatatttatcacctgtactagaaattatgaatgggtttgtgctctttttatttattggattaattgctttctcaacgagtttagtagggaataaaactacgttatttgtattgggtatcattatttttatgttgttaggaataaggattggtaatacggtcttttgggatgaaagaaaagtagatggttggacgggaatgttaattccgtgcatgttagctgcaatcgtgacaaatatagagcatgaatattatcaattacatttttggcttattatcgttttaacaattctttctgttttgtatataagcacagtagtactaacatatattgcacatgaaaaaggagatgttaaaggcactcgtttctttagaggacgggcattattttggagtgtgccgacgatggcagttatcgcgcttattgcgatattagtaaatggatatcaattttctaattggcaactatttttagaaaattggtggatctttatcttttcgtttattgcttttttaggtgcaacgcattatttattccatcaacatcattacatatgggcgttgttatttgcattcacacagcttctatttgccttttttggtcaagaaacattattattcgtttttgaaacatttagttcttttggaaatatatttgtatttgctatgctacttgttggtatcgctttttacttgcaacaatatttttatatacaaaaacaaaaataagagctaatcatagtttttgtgacgcatataaagtgtgttacactgaaaataaatagtacttgaagttattggaggaattcttgtgggtgagaaagaaaaagaatttgctgtcattggacttggtcgctttggtggaagtatttgccgagaactagctcaattaggtatggaagtaatggcaatcgattcagatgaggataaaattaatgaatttgcaaatatagcttcgcatgctgtaattgcagattcaacagatgagatggtattaaaaagccttggtattcgaaattttgatcacgtagtcgttgctattggagataatttaaattcaagtattttaacgactttgattttgaaagagttgggtgtaaaaaatattactgtaaaagctcaaaatgattatcatgaaaaagtgttaagtaaaataggtgcagatcatattgtgcatccagaacgtgatatgggaaaaaggattgctaataatattgcatcaagcaatgtgctagactaccttgagctttcagatgagcatagtattgtagagattattgcgaataaaaaaattgatgggcactctttaattgaattagatattcgtgcgaagtttggattgaatattgtagcaattaaacgaggcaaagaagttatcgtatcccctcgagctacggagaatattcaagcaggagatatattaattgtcattggtcatgacgatgaagtggatcgatttaaacactttttaagataagagaaaagaaaaggacaatgccttcatggcattgtcctttttcttatatttccataatgattggtaaaatcattggacgacgtttcgttttctcatataggaatggggctaatgtgtctgtaatttcatttttaatttcagaccattgtgttgttttacgctccattactttttctaaatgagttgtaattaatgtttgtgcatcattgattaaatcgctgctttcacgcatgtaaacgaaaccgcgtgagatgatatcaggtcctgctgcaactttaaattctttcatatcaatgcttacaactacaattacaagtccttcttcagaaaggatacgacgatcgcgtaatacgatattgccaatatctccaataccgtttccatcaatgtagaccgaaccagatgggatttttccagctacgctagcttcatccgaacgtaaagcaagaacatcgccattatccataatgaagcaattttcttcagggatgccacaatcatttgctatgttcatgtgcatacgctgcatacgatattcaccatgaattggcatgaagtacttcggtttaattagacgtaacattaacttttgttcttcttgtccaccgtgtccacttgtatggatatttgaaagtttcccgtgaattacatcagcgccagcgcggtacaacatgttaattgtacgacttacgctaattgtatttcctggaattggtgaagaagagaaaacaactgtatctccaggaataatttgaatttggcggtgtgtaccatttgcaatacgtgaaagtgctgccatcggttcaccttgactacctgtacataaaataacaactttattagctggtaagcggtttagttgagatgcatctatgaatgtatctttcgggcaacgaatataaccaaggttttgtccaatttcaatcgctgcttccatacttcgaccaaacacagctactttacggttgttttcaacagcagcttcaacaacttgttgtaagcggtggatatttgatgcaaaggttgcgaatataatccgtccttctactttacggaaaatgtcttgaatgctatcaccaacgcgacgctcagacatagtaaagtttggaacttcactgttcgtactatcagataatagacatagtacgccatctttaccgatttcagccatttttgttaaatcagctggttcaccaactggtgtgaagtcaaatttgaagtcacctgtatgaacaacttgaccttgaggtgttttcacaacaacgccgtacgaatctggaatactgtgagttgtacggaagaaggatacagacgtttttttgaatttaataacgtcatcttcttgaatctcgtaaagttttgctttacgaagtaagccgtgttcttctaatttgtttttgatgagtgcaattgctaattttccgccgtaaatcggaatgttcacttgacgtaataggtaagggattccgccgatatgatcttcgtgaccatgtgtaatgaataaccctttaattttatcttcgtttcgcacaaaataagtgtagtctggtattacataatcgatcccgagaagttcgtcctctggaaatttaattccagcatcaattataataatttcatcttgaaattgaacagcgtatgtatttttaccgatttcaccaagcccaccgagagcaaatacagcaacttggtcgttttttagaaatttcatatcgctatacgatttccgctaatgttaaatcagcgttttctttttcatattcaagatgagcgccagtaacagactgaacaaactcgatattatatgcgaacttatttaactttgtacgaacatccttttcagacgtagcctctaaatataaaacttttgtattttcacgtactggaacctcagttaatttttcttgataaaatactttaaaaatcatttggaaaacctctccttgtctatgttttgcattatctgttacttattataaagcaaacagtcacgattttcatgttttttcgaatgagaatgaagaaaaagcccgaaatgggcacaatttaagcgattgtctttttacggactagaccgtttaaataacgcttgagctttttcttcagcttcttcagcatgattactccttcctttccttattttaaacatgcctattactagtgaaaactctatctctgatataagagataggacaaaagtgaatggtgaatcttgtcctttcccatacagtgaaagttattctatagtaacgatcagtagccgttagttataggtatagtatgaggaagaatggaaaagaaaattcatccgaacaagtatctacatgttttactaatatatatatgcaaagtttacaaataaggtcagaaagggaacgctttcttcacagatgtttaatatgttatacttttttttagaatttgaaaagtgatattcaaaataggaatatagagtcccagaaaggattttgacaaatgaatgataaaattgtcttttttgatattgatggaacattattagatcatgataaaaaaattccgcaatctacacgagatgcagtaaaacagttacaagaaaaaggtgtacatgtagcaattgcgacagggcgcgcgccatttatgttcgaagatattcgcagggaacttaatatacataattatgttagttttaatggacaatatgttgtctttgaagatgaggtaatatttaataatccgttacatccagatgctttacataggtttactcagtttgcaaaacaagaaggatatccacttgtatatcttgaccatcaagatatgagagcatcagtggaatatcatgattatgtgaaagaaggctttggaagcttaaactttgagcatccagcatatgagcctaatttttatgaggaacgtaatatttatcaaacactacttttttgtgaagtaaatgaagaggaaaagtttattaatcattatccagattttcattttattcgttggcatgcatattcaatggatatcattccgaatggtggttctaaggcaaaaggaattgagaaatacattgaaaagttaggttttaatcgtgatcaagtgtatgcatttggagatggcttaaatgatttagaaatgatcgaagccgttggcacaggtattgtgatgggaaatggccatgaagacttgaaaaaacttgcaaatcatgtgacaaaggatgttaatgaagacggtatatatcatggactaaagtgggctggattgctataagtgaatatggaacccatttcataataaaaaggcggaagattaacttccgcctttttattattatcgctctagaggtttggaatcatcaggagcggcaaaaggattttctttattgatatggtcatagaacataacgccatttaaatgatcaatctcgtgttggaatacgattgctggtaaaccttttaaacgtaattttacttcttctccgttaatagaagttgcttttactgtaattcttgtataacgaggaacataaccaggtacttcgcggtctacagacagacagccttcaccaccctgtaaatatgtacgttcaacagaatggctaatgatttttggattgaataatgcatggctatataatgtaccatccgcatcggttacatgaactgcaatcattttttttgaaacaccgatttgcggagccgctaatccgattccagggcgtaaactatatttttcagccatttcaggatcttggctatttattacgaattcaatcatttcttttaaggtagttgtatcttcttcgcttgccggtaatgacacctcttctgcaacgttgcgcaaaataggatctccttcgcgaataacatctttcattgtaagcatatgtaatctctcctttcctctttagtctaccaaaggagatggaaaaagtcatcggcaagaaagggaaggcattttggaaattgttctattatagagtagttatgtatgtgataaaaagaaaaagacagcaaagccgtctttttctttccatagttgtttcgttttacattagcgaatgcaagcagcaccaacgataattaaaagaataaacaacacaacgattaaggcgaagccgcgtccagacccgccacaagaaccgccataaccgtaggaaggatatgaacaagttggatagcaatatgagtatccgtacatgagatgacctcctttatcatttcccgctaatactgcggttactataatgtatggaagagagggtagaaatgtataggtatttacctaaaaaaggaagagtagtttgtatatttttgttacgaagagagaaaaactaaagagaattaaatcgtttacatattattctaagagaaaaaataagtgaaaaagggaataatataacagtaggtcaatgcttactaatacagatgtaaaaaataaaaacacgtttgtgtagtagaaacctgcatattatttataaaaaaacgtattcaaagtaattgacatcgtaattagaatagttgtaaactaaaaaacgtgatcaagattgtattaatatgtttctgaaaaaacattagtacagattgttaggtacacaaaattattctcaaccgacatacaaacatgttggtttacatcgttgcgctttttaaactggaaaatagccagtgaaagcgtttcagaatatggttcaagagaggaagaggtgaacggaatgggtactaaaacaaaaaagaccctatttaatgttgatgagcaaatgaaagctatcgcagctcaatttgaaacattacaaattttaaatgaaaacggtgaagttgtgaatgaagcagctatgcctgaattatctgatgatcaattaaaagaattaatgcgtcgtatggtgtatactcgcgtattagatcaacgttctatttctttaaaccgtcaaggacgtttaggtttctacgcacctacagctggacaagaagcttctcaattagcaagtcatttcgcacttgaagcagaagacttcatcttaccaggataccgtgatgtaccacaattagtatggcacggattaccattataccaagcattcttattctctcgtggacacttcatgggtaaccaaatgcctgagaatgtaaatgcattagctccacagattattatcggtgcgcaaatcatccaaactgctggtgttgcgttaggtatgaaactacgtggtaaaaaatctgttgcaattacttacactggtgacggtggtgcttcacaaggtgacttctacgaaggtatgaactttgcaggtgcattcaaagctccagcaatcttcgttgttcaaaacaaccgttatgcaatctctactccagtagaaaagcaatctgcagctaaaactgtagcacaaaaagcagtagcagcaggtatttacggaattcaagtagacggtatggatccattagctgtatacgcagcaactgcttttgctcgtgagcgcgcagtaaatggcgaaggccctactttaatcgagactttaacattccgttacggtccacatacaatggctggtgatgacccaactcgttaccgtacaaaagatatcgaaaacgaatgggaacaaaaagacccaatcgtacgcttccgtaagttcttagaagctaaaggcctatggtctcaagaagttgaagagacagtaatcgaagaagcaaaagaagatatcaaacaagcaattgctaaggctgaccaagctccaaaacaaaaagtaactgatttaatggaaatcatgtacgaaaaaatgccttacaacttagctgaacaatatgaaatctacaaagaaaaggagtcgaagtaagccatggctcaaatgacaatgattcaagcaatcactgatgctttacgcgttgaaatgaaaaatgaccctaacgtacttgtatttggtgaagacgttggtgtaaacggcggtgtattccgtgctactgaaggtttacaagctgaatttggcgaagatcgtgtaatggatactccacttgcagagtctggtattggtggacttgcagttggtcttgcacttgaaggattccgtccagttccagaaatccaattcttcggtttcgtttatgaagtaatggattcaatttctggtcaattagctcgtatgcgttaccgttctggtggacgttggactgctccagtaacagttcgttctccattcggtggtggtgttcatactcctgaactacatgctgatagcttagaaggattagtggctcaacaacctggtctaaaagttgttattccatctactccatacgatgctaaaggtcttttaatctctgcgattcgtgacaacgatccagttatctacttagagcatatgaaattgtaccgttcattccgtcaagaggtaccagaaggtgattacacaattgatttaggtaaagctgatatcaaacgtgaaggtacagatgtatctgttatcgcttacggtgctatggttcacgctgcattaaaagctgctgaagaacttgaaaaagaaggtatctctttagaggttgttgacttacgtacagttcaaccattagatatcgaaacaatcatcgcttctgttgaaaaaacaggtcgcgtagttgtagttcaagaagctcaaaaacaagctggtattgcagctaacgttgtagcggaaattaacgaccgtgcaatcttaaacttagaagctccagttgtacgtgttgcagctgctgatacagtattcccattctctcaagcagagagcgtatggttaccaaaccacaaagatattgttgaagctgtaaacaaagtaatgaacttctaatttttagcttttcatgtgcaaaagaaatcagcacatgctggtttcttttgtacatattccataataatgaaatgaatcagggggctgaattccgtggcatttgaatttaaactaccagatatcggtgaaggtatccacgaaggtgaaatcgtaaaatggtttattaaaccaggcgatgaagtaaacgaagacgatgtacttcttgaagtacaaaatgataaagcagtagtagaaatcccttctcctgttaaaggtaaagtacttgaagtacttgtagaagaaggaacagttgcaatcgtaggagatacattaattaaatttgatgctcctggatacgaaaaccttaaatttaaaggtgacgatcatgatgaagctccaaaagctgaagaagcagcagtagaagctccagcagcggaagctactccagcagcaactgcagaagtagtaaatgagcgcgtaattgctatgccatctgttcgtaaatacgctcgtgaaaaaggtgtagacattcataaagtagctggtactggtaagaatggccgtatcgtaaaagctgacatcgatgcatttgcaaatggtggacaaactgtagcagcaactgaggctccagcagcagtagaagctactccagcagcagcgaaagaagaagcaccaaaagcacaaccaatcccagctggtgaatatccagaaactcgtgagaaaatgagtggtatccgtaaagcgattgcgaaagcaatggttaactctaaacacacagctcctcacgtaacattaatggacgaagtagatgtaacagaacttgttgctcaccgtaagaagttcaaagcagtagcagctgacaaaggtattaaattaacttaccttccgtacgttgttaaagctttaacatctgcattacgtgaatacccaatgttaaacacttctttagacgatgcatctcaagaagtagttcataaacattacttcaacatcggtatcgcagctgatacagacaaaggtctattagtaccagttgttaaagatacagatcgtaagtctatcttcacaatctctaacgagatcaatgatcttgctggtaaagcacgtgaaggtcgtctagctccagctgaaatgaaaggtgcttcttgcacaattacaaacattggttctgcaggtggacaatggttcactccagttatcaaccacccagaagtagcaatccttggtatcggccgtatcgctgaaaaaccagttgtgaaaaacggtgagatcgttgcagctccagtattagcattatctctaagctttgaccatcgtttaattgacggtgcaactgctcaaaaagcgttaaaccaaattaaacgtctattgaatgacccacaattattagtaatggaggcgtaataacaatggtagtaggagatttcccaattgaattagatacagtcgttgttggtgcaggtcctggtggatacgttgcggcaattcgtgcagcacaattaggtcaaaaggtagcaatcattgaaaaagctaaccttggtggcgtatgcttaaacgttggatgtattccttcaaaagcgttaatcaatgcaggtcatcgttatgagaatgcaatgcattctgatgacatgggtattactgcagaaaacgtaaaagttgactttacaaaagttcaagaatggaaaaacggcgtagttaagaaattaactggcggtgttgaaggccttcttaaaggtaacaaagttgaaatcattcgcggtgaagcttacttcgtagatgctaatacattacgcgttatgactgaagatgcagctcaaacttatacgtttaaaaatgctgttcttgcaactggttctacaccaatcgaaattccaggattcaaatactctaaacgtgttatcaactctacaggtgctttaagcttacctgaaattcctaaaaaacttgttgtaatcggcggcggttacatcggtatggaattaggtactgcatatgctaacttcggtacagaagttactgtagtagaagctggcgacgaaatcttagctggtttcgaaaaagctatgagctctgttgttaaacgtgctctacagaaaaaaggtaacgtaaatatccatacaaaagctatggctaaaggcgttgaagaaacagaaactggcgtaaaagttagctttgaagttaaaggtgaaatccaaactgtagaagcagattacgtattagtaactgtaggtcgtcgtccaaacactcaagaaatcggtcttgagcaagttggagttaaaatgactgaccgcggcatcatcgaaatcgatgagcaatgtcgtacaaatgtaccaaacatctatgcaatcggtgatatcgttcctggaccaccattagctcacaaagcttcttacgaaggtaaagtagctgtagaagcaattagtggccatgcatcagctatcgattacatcggaattcctgcagtatgcttcactgatccagaactagcatctgttggttacactaaaaaacaagctgaagaagctggaatgactgtaactgtatctaagttcccattcgctgctaacggtcgtgcattatcattaaacagcactgacggtttcctacaacttgtaacacgtaaagaagatggtcttcttgtaggtgctcaagttgcaggtgcaggtgcttctgatattatttctgagattggtttagctatcgaagctggaatgacagctgaagatatcgctcaaacaatccatgctcacccaacattaggtgaaatcacaatggaagcagctgaagttgctcttggaatgccaattcacattgtaaaataatttaagtaatgtaaatagcccttctcttattgtaagagaggggctatttttattttcatcaaatgacttgcaaggtctttaaacgtacttgtcgaatgaatatataatactttaacaaatgattcaggcttaacttacttcgaaggtaatatatatcatcctataatatgtaattgattcaaacttacccccatatattaataaaatagagcatgtcaaaggagaaggttccatgaaaatattacatgttatattttatcatttactactatggagtggcttttccactgtattaacattatcgaatggtgataagtttcattataaagttattctttttttcgtatttctatatttagcctatgtaatagcatattttgtattgcacgtaagaaagcaagctttatttcttacatgttcgaattgtatattatttttaatcatattatctattttttaaattagcgtttataaaaatacattgttcttccattaaataattgtaactctccttctaatttcttcgctaaaaaacggcaaaattcatttgctttccctttgtcaccaaatgttgcattaggtggtaaagaaacttggatgaaagattgttcattttctataccaacaccaatataaattgagtcataccggtcgtgagtggattgaagttttaatgttgttgtagatgtatctaaaatttcataaggaaaagcggtatttgtatacgtgtaattaatttgggcaccagttttagaagtaactgttttataataatgaaaaagttgttttatatcatctattgaaactgattgttggttggatttcggtacaagcgtaataaaggcgtgttgcatataagttccccctagcttagtagaatactatcattctacatcctactgaattttttgacaattaaaaggagtattacatgttttgtttaatatactattaatgaaacgtgatgtagaaaggtggaaaccaatgtttgaaaaattgtatgatgagcatgaaagtgtgaaggtacgatttttagggtttatgacacatgatacacgttatgattttggtgttatttatacaaatatgttttttggaaagccgctcattgtttgtatgcaaacaggaaggtctactttactcggacgagatgatgtagagaatgttcaatatatacaggagatttttaaattaggatcagaagaggaagcaaaggagttagctcagtttttcaaatttctagttccgtcaacttctttacatgcggaatatgaagaataattaatgtgaaacagtcgtacttataaatatggctgtttttttattttaatatcgcatactaatttaaattaaaaatatttaatgtgttatactaaaaacctattgacgtaaaaagtataacatattaaaataaagacagaaagttaagcggttacaaaaagtttttgggattataaacttagggggaaatgaaaaatgggaacaatcgtatgtcaagattgtgaaggtacaattgcacacttcgaagatgagaaagtaacggtactttacgggaaatgtggatcttgcggatgtgatcacacagagcatacaaaagcccaataattgataggaaatggacagctaaaagtttttaggaccataaacttagggggaaatgaaaatgggaacaatcgtatgccaagtatgtgaaggaacaattggacattttgaagatgaaaaatcaacagtactatacgggaaatgtggatctcattgcgaatgtgaccataaagaacatacaaaagcttaataataagaaaaagcgcctacatgtgtaggcgcttttttaataaattgtagttgtatgaccaactgttgcaacgattgcatcatctctaattggaataaagcttatggatgtctgtggtgtactagaagaagcatattggctcattatacggctatcgatacgggtaatagtatcggtcaagaaagctgaaataaaagcgtaagggactcttcgttcatttaatgaataaataatttcttcttttgtttttacacccacgccatgtccgtaaaaaaagaaatttcctaaatagattgtgttttctccttgccactcaatcgtagctggattcacttgtgggtttttaaagtaaacgaggtcacctggaacaagatcgccaccgttttttgttatgagccttagatcttgatcgtagtcccatgtataaagtaaaagatttgcaaatagacgattgaaagtttcttcctcatacaatgatagtaaagctttataaaaaataatgatcatagcggttgcgcattcagttccatatagttttccatttttaaaaatatcttgtatggcaatagaagatggtatgtttggaagaagctcgaatcctccaagggatgttcttttccaatactgggggttgcaaaaggattgttgaaatgtgcgaaactgaaatccactttgaaaaagctctagtgcagagataataatattaactcgtaaattgagatcaaagctgagttcatcagctgttcggaaggaataaacttcttgatttcctgccattattgataaaatttgttgtttctctgctgcaaatggctcatattcatttgtaatataaggatgtacaatagaacggcctattacaatcataatagtatccccacctatacgttacattcttaagtatcgtatgaagaaaaggaaaaaaggtgaaaaaaaagcctatcaactgataggcttgtactctttaataacacgtaatgtttgtaatgtcatatcttcaggaccttgtacaggtaaacctgcttctaagtttttccgaatatactctaagttttcttgtgtaataatttcccccggagtaaagattggaatccctggcggataaaccataacaaaatcagctataatacgacccgctgcattttcaaatgggatgacttctgtttccgaataaaaagcatctcgaggagaaagtgctagcactggaatttctggaatctctacttgtacttgaacacctttatctgccctatttctaaatgttgctgctaaatcgtgtaaagctgcaataagtgtatttgtatcactttctgtatctcccaaagtgataagacatagtatgttgtatagatctgagagttctacttcaatgttatattgctctctaagccatacttcagcttggtggccggtaatacctaaatcttttacagatacaattatctttgtaggatcatagttaaaggtagcatctgtacctaacatttcttttccaggacagtaaagatgctcaatagaatttatagcatcacgaacatgctcagctaattgtattgtttgttctatgagtgctgttccttctgtagcaagacgttttctcgcaacatcaagggatgctaacaagatgtaagaagttgatgtagttgtaagcatgctaataatagattggacatgctttacattcactaagccttctttcacattaagaatagaactttgagttaaagagcctcctaatttgtgaacacttgttgctgccatatccgcaccagcttgcatcgctgacataggtaattcatcgtgaaaatgaatatgaacaccatgagcctcgtcgactagtacagggatgttataagaatgtgctaattgtacaatctgttctaagtctgcagcaaacccaaagtacgttgggttaataacaagtaagccctttgcatctgagtgctcttccagtgcttttttgacagattgaattgtgattccatgagaaataccgagcttcggatcgatttcaggatgcatgaaaatcggttttgcacctgagaaaataatagctgacattactgatttatgcacgtttcgtggtactaggattttgtcaccaggaccgcaaacgctcatcaccattgtcataatagcgccacttgtaccttgaatagaaaagaaagtatgatctgcaccgaatgcagcggctgctaaatcctgtgcttctttaatcataccttttggatgatgtaaatcatcgagtggcgcaatattaattaaatcaattgctaatgcattatgcccaataaattcgcgaaatgtaggatccatgccctgtccttttttatgaccaggaatatggaattgaattggatttcgcttactgtgctcaactaaagcggtaaacaatggtgtttcgtattgggacaatctatacaccccttcttcttcataatatttagtgtaatttgttttatataatcctgctctaaaaaagtgtagccttttttagaataaggcttgtttttctgccattcaaaaaatcgtttttgagatggtagcttcactttattttctataaaacaaaagcattatatcaccaataattatagatgtatagaaaaaaatgtttttaaggtgagtatgtttaatagttagcctcaactaatgaatagaggaagacaattccattaaaatgaataaatagtgtataatgcagagtggctataatgaagaataaaatattctctttaagatagcataatgaaacaagaagaaatgataaatgaggtgcgaaatggaatatcaatatccgttagattatgattggtcaaatgaggaaatggttacaattgttaagttttatgaagcgattgagaaagcttatgaaaaagggattataagagaagagttaatgggtttatatcgtcgttttaaagagattgttccatcgaaagcagaagaaaagaaaattgataaagaatttcaagaagtaagtggatactctatatatcgtgctattcaaagggcaaaagaagtcgaagaacaaaagctcgtaaaaatgtaaaaaatattttgaaaaataaaaactgaagtgatataatgtgataacaactaaaaacggacaatataaattgtccgttttctactatcgattacacagtgcatataaaggaaggagtgattgcatcgtagattcaatcttagcaaggaattgttcgttggtcattgctgaaaactcctctggtgatatatgaataccaactaataattctgctttttttacagtagctaatcgttcaatcatcttttgtaagtcttcggtttcaagtgttttatgtaatttcacacttggtttagtatggtcaatggaccaaacgaagtcatttggaatatttgtttttaaatcatttaaatgttctaagaaggcatgagccgtctcaactttttgtggacactcatagattaaaccaaagtatatgaaggcatgagtaccccataagccgatttggaaatgcggtagcattttatatcctcgtttatttgttgaaaaagcaacccaagtatcgtttggtggattgactttgcggcgtgcgtgttttgcaacatgataaaaaaagttctcatcagtttgtttggataagtattctgcaaattgttcccctaaagcttctagcttaggatgaatgttcgttttaattgcactcattcgttcttcgagaccatcaactgtaaagacatcaaaatcagttgacttgaatgtttgtattgtcatgattgttcctccaactcctattttgcttttattttagcatagcttgtactattcataaaaaaaacagcacaaaaaaatttaaataaaaaaatataattttgttgcatagatgatttatccaacatagtatagtataaaacaaaaaatcagaaaatttaattaattctagtccgagggcagacgaatattgggaggaggcaaataatatgagacaggtgattaatgcgttaaagagaacagatgctgaaaagagaataccggtgctacgtttggagctagattatgaattagcaactttatatgatgcgatgatggaagatgacaaacagaaaaaagaagagtgtgtacaaaagttagaagtgttaagacttgaaatgattcgtttagaagcgtaataatagtatatgtataaaaaattagttggtgcgaaccttataaagggttcgttttttctgtgaacagtatagatcggagtgtttaaacatgcaagaagtatggaaagacattgatgcacacgccaaacggtggattcgggatgcaggagagcatttaatggcatcaatgaaaaaagcacttattatagaaacaaaatcaaatgcagctgacttagttacaaatatggaccgagagatagaacagtttttaattgggaaaattaaagaaacattcccgaatcataatattttaggagaagagggttatggagacgagataacgtcttctgacggggttgtttggttaattgatccaattgacggcacgatgaactttgttcatcaaaaaagaaattttgcgatttcaattgggatttatgagaacggtatcggaaagattggacttatatatgatccagtgcatgatgaactatatcatgcagtcaagggatatggagctttttgtaatgatatatcaattcctacactgaaaaaaggaactgtagagcaaggtattgtagctttaaatgcgatatggcttacagataatccattgcttaatatggaaagtatgatggcacttgttaagaaagcaagaggcacaagatcatatggctgtgcagcgttagagatggtatacgttgcaacaggaagaatagatgcatatgtaacgccgagattatcaccatgggattttggcggaggaaagataattgtagaagaagttggaggtaaggtgacgacattctctggagcgccactttctatcatagagaagagcagtgtgttagttgcaaaaccaggagtgtatgaagaagtgttatcgtttatatgagagcaacaaaaaaagtaagaggctgtgtataagcttcttactttttagcgttattgtgatttgcgcatttttctttttgttacaaaaccgtatccaactgtaacaaatgtgccgataatgcaaataataataccgattggactattttcagcaatcataatgccgataccgattaagaaaataacaccgataattgcagttaataaaaagcgatattgaatgtgttccatttcttcaccctccaatctcattttactttcacaaaagtaagaatacaactatattttcattcttgcttttattttaattgctattgtatccccttcgctcttataatagagaaggattaaaaagacattaggagttggacatgttgaaaaaacgacaagatttacgtaatatagcaattattgcccacgttgaccatggtaaaacaacacttgttgaccagttattacgtcaagcggggactttccgtgcgaacgaacacgttgaagaacgcgcaatggattcaaatgatctagaaagagaacgcggtattacaattttagcgaaaaatacagcgattcactatgaagataaaagaattaacattttagatacacctggtcacgctgacttcggtggagaagtagaacgtatcatgaaaatggttgatggtgttttacttgttgttgatgcatatgaaggttgtatgccacaaacacgatttgttttaaagaaagctcttgagcaaaacttaactccaatcgtagttgtaaacaaaattgaccgtgacttcgctcgtccagatgaagtagttgatgaagtaatcgacttattcattgagcttggtgcaaacgaagatcaattagagttcccagttgtatttgcatcagcaatgaacggaacagcaagcttagattcaaacccagcaaatcaagaagagaatatgaaatcattattcgatacaattatcgaacatattccagcaccaattgataacagcgaagagccacttcaattccaagtagcacttcttgattacaacgactacgttggacgtattggagttggtcgcgtattccgcggtacaatgaaggttggacaacaagttgctttaatgaaagtagacggaagtgtgaagcaattccgcgtaacgaaattattcggttacatgggattaaaacgtcaagaaattgaagaagcaaaagcaggggacttagtagccgtttctggtatggaagacattaacgtaggtgaaacagtatgtccagttgaacatcaagatgcgttaccattattacgtattgatgagccaacactacaaatgacgttccttgtaaataacagcccatttgcaggtcgtgaaggtaaatacattacatctcgtaaaattgaagagcgtcttcgttcacaattagaaacagatgtaagtttacgtgtagataatacagattctcctgatgcgtggatcgtatctggacgtggggaactacatttatctatcttaattgaaaacatgcgtcgtgaaggttatgaattacaagtatctaagccagaagtaatcattaaagaagttgatggcgtaagatgtgagcctgtagagcgtgtacaaatcgatgtacctgaagaatacactggttctattatggaatctatgggtgcacgtaaaggtgaaatgttagatatggtgaataacggaaacggtcaagttcgccttactttcatggttccagcacgtggtttaattggttacacaacagaattcttaacattaactcgtggttacggtattttaaaccatacattcgattgctaccaaccagtacacgctggacaagttggtggacgtcgtcaaggtgttctagtttcacttgaaacaggaaaagcatcacaatacggtattatgcaagttgaagaccgtggtgtaatcttcgttgaaccaggtacagaagtatatgctggtatgattgtaggagaacacactcgtgagaatgacttaacagttaacgttgtgaaaatgaaacaacaaactaacattcgttctgcgacgaaagatcaaacttcaacaatgaagaaaccacgcctaatgactttagaagaatcattagagtacttaaacgatgacgagttctgtgaagtaactccagaatcaattcgtctacgtaaaaagattcttgataagagtgagcgcgaaagagctgctaagaaaaagaaatctgtcgaagcgtaaaaataaaaaaacaacgccctttataaagggcgttgtttttttattttgtttattttttagaatatttactcatttttgtggacagtattttttttgcgagttactcttgtattaagtgtataaagaaaattgcattttactgctaggggggaagagtgtgttagaaaggatgtctttttttgcaaaattgtgtaaggtagatgaaaatccagagttaggaatgtggttactttatgggacgattattatattaagtgctctcgtttataatttagggtttgctagaaagttgtctgtactaaaaaatattgtgatatacatatcattagcaattggatgcacagtattaaccttttttgctgtgtttttacctgttggagaaggacttgttgtagcggcaattgtacttggaatttatagattgcgtttgcgtcaagcgaaacaacaaaaagcaggataaggaaggggagttttcatgcgttcagtacaagatgcactatataattggttaacaattaaaacagttgcggaagcacgcccagatgatagtgctgcaaaagaaacatatttgttatttcaaaatatgatatatgaagaacataaattaagaaatgttgaagtcgaaaagaacgaggaaatgtatttaattacatatgaaatgaatggagaacggaaatctgcaaggtttccgttagaagccattgattgttttttggatcagatgaatcgtgaaccagaaaaatataaataagtccttatctatatgagtaaggacttatttacattttaccaatcatcttcgatttttttatcacgatataatcggaaattaccacttgcatgacgttccattgtacgctctgcaattcgttccgaacattccatgcacatatatgtatgaatagggcgattacgcagtttttttgccataggattttcatcatctaacatatcttttttatcacaaatcatacatttgactctcatttcgtcacctcaatacgaattctatcagtataagtatatcatggaagtataatgtttttgaataatagtgggaaaaaataatattttcgcaattcaaaaaataagttatgataaggatataccaagtatgtttggaggtgaaaatatggcgaatgtagtagagcctaccttaacagaggatttagtacaaacgttgcgtaaagagtgtattgttatgatagcaacggcagatttcgaaaagcaagttcctaacgtaagtgctatttcttgggtgtatgcagtgagtaaaactagtattcgatttgcagtagatcaacgttcacgtattgtggaaaatatacggcataatacaggtgtggtattgactataatggcgaatgaatccgtattttctataagtggtgcaggtgaaattttgacagatagaatggaaggtatttctctaaaattaactgtaatagaagtaaatgtgcaagaagtgcgtgatgttatgttttatggagcgaaacttgcaattgaaccaacatatgaaaaaacatatgatcttcgggcagcgaaaaagctggataatgaagtgttagtagggataagagaattataaagatgctaaataggaaattcgtttattcacttttgtaatcggttattgtgatttaacgttaataattataataaaaagtaatatattgaatagaaatgaataaagaataaataaaaggtttaatgactatgattttcgattctacctcgtttacacggtacatataattataacaatggttcgtccatattgtatggatgaaacccttgttctacaaatttaaaagtggagtcagggggtaacaggttggataaaatttatgtgttagatacgaatgtacttttgcaggatcctttatctattttttcatttgaaaccaatgaagtagtgattccagcagttgtattagaagaggttgattcgaaaaaacgttatatggatgaagtaggacgaaacgctcgttatgtatctaagttaatagataaatttcgtgaaataggaaagctgcatgaaagtatcccgctagaaaacggcggaacatttcgtattgaattgaaccatcgttcattcgtgcaactacaagatatttttgtagaaaaaacaaatgataatcgaattttagctgtagcaaaaaatctatctttagaagaacaggaaaaagaggacgggaagtctgttattttggtaagtaaagatgtgctcgtaagggtaaaagctgatgcaattggtttgaaggctgaagattatttaagtgatcgcgtaattgaagtagaaaatatatattctggctttttagaaggatatatatcaaaagaacaattggattatttttatgagaaaggtgaattgcctctatctgaaattgcgaatcatcctttttacccaaatcagtttgtagtgatgaaagatgcattagggggctctagttctgctcttggcattgtggatcacttaggtaagaaggtaaagaaacttatttttcacaatgaacaagtgtgggggatacgaccacgaaatgtgcagcaaattatgggattagaattgttgcttcgtgaagatattccgcttgtaacgttaacggggaaagccggcacaggaaaaacgttacttgcgttagcttcgggacttatgcaaacagaagacttagggttatataaaaaattacttgtggcaagaccaattgttccagtcggaaaagatatcggttatttaccaggagaaaaagaagaaaagttaagaccatggatgcagccaatttttgataacctagagtatttatttaatacgaaaaagccaggagagttagatgctattttagctggaatgggttcgattgaagtagaagcccttacttatatacgcgggagaagtattccagatcagttcattatcattgacgaagcacaaaatttaacaaagcatgaagtgaaaacgatattaactagggtaggggaaaagagtaagattgtattgatgggagatcctcagcaaattgatcacccatatttagatgaatataataatggcttaacatatgttgtagagaagtttaaagaacagcgtattagtggtcatgtgaagtttgttaaaggggagcgatctaatttagctcaactagcagcagatttattgtaaaaaggagtgagcttaagctcactccttttctttaaataattgtaaatttacggatgttacggattggattttgttgattagatccatcattgaaatagagatgaacaggcccgtcttcttttaatggttttccttcttttgaaaagcctagtatagcatttttgacagtttctaatggaagtgtcattgtatgatctaccgtttcaatttcaacttgcctagcgtcctctaaaatttcagcgttagcaagaaatggatgaaatggtataccaaatgttccagtaatcagctgttcttttttatatttcttcacactttgttgtattggaggaaaagcggcaccatcacggatttcgcgatcccaatgttctgaagtgttttttaaataagtttctagttcagacgtgttttctctagtttcatcaaagtaagttgtcaaatctacttttcgatcatcaaagatccaaacagttggatcaatagtgattggaaaacgtacttttccgttaataaataaaatttcgctcattgttgttcccccatttgtgttatactcccacttttcagtataatagtattagacactgttgtcacaaaaaatgtttctattgcaatttattaaaactatcgctaatattaatagataggatagaggagagtaggacggaaacggagggaatcaatttggcgtctgagacagtagcaaatcatcaggaaaaggcactagcccttctacaagcggatgcagagaagattttaagacttattaaggtgcaaatggaccatcttacaatgccgcaatgtccattatatgaagaagtgttagacacacaaatgtttggactatcccgcgaggtcgattttgcggttcgccttggtcttattgcagaagaacaagggaaagcaatgttaggtgagctcgaacgtgagttatctgcacttcatgaagcatttacaaacaaacaacaataacgggttcaaataagggggctcaaactaaattagtttgagctttttatttgtataataaagcaggaagaatcaatgtacatatggaatacaacaataattaaattgaaacagaaagaggaaatgaaatgaaaaaagtatggaaatcaatggattattcattattacttcctcttgttatcttatgtgtgctgggagtaataatggtatatagttctagttccattgttgcgatttcgaggcataactggccggcaaattacttttttaaaaaacaattaataactttagctattggaacggtattgttagtaattgtagcttcgttaccttataagttttggagaaaacgaataattttatcggcgatggggctagggagtattgctttactagcagcagccttgatttttggtaaggaaataaatggtgcaaaaggttggatattaggtatacagcccgctgaatttgttaaattatcgattattattatattagctcgcttttttgcaaggagacaagaaacaaatacacctgtttttaaagggtcgggacttacacttggttttgttggaatggcaatgtttttaattttaaagcaaaatgatttaggtaccgatttgttaattgcaggaacagtagggattatgtttctttgttcaggagtaaggattaatttatggattaaacgaattgttttaacttctatagtatggattccagctctatattttttggctaattataaattaagtggatatcaaaaggcacgtttttcagtttttcttgatccattcaatgatcctcagaatgatggattccaattagtaaattcttttattggaattgcttcaggagggctaaatggtcgaggattaggaaatagtgtgcaaaaatatggttatttaccagaacctcaaacagattttattatggctattatatctgaagaattaggttttattggtgtagctattattttaatttgcttgctacttattattattcgttcattcaggattgctcaaaaatgtaacgatccttttggaagtttaattgcaatcggaattgcaagtttaataggagtacaaacttttgttaatgttggtggtatgtctggattaataccgcttactggagtgcctttaccgtttattagttatggtggaagttctttaatagctaatctacttgcaatgggaatactacttaatattgctagtcacgtgaaacgacaagagaaacaacagaatggtgtaatgaaagaaagagaacaaaatggaccacatcttgtagttgtaaaataaaaacacattgtgctttagagcatgatgtgttttttatttttaagtagttttaaatatgatgtactaatttctctttcagttaaaaggtatatcacattaagttaaatgtgatatacaattaagttgttagaaaaggaagaggtatgctatactatttttgtgaaacaaattgcacagaaaacttatcatttgttagaaaataaggtatgatggataaaaataaagtgaagctttctaagtataatataatgtggaaagtgaagaacttcacgctttttaaggtgtgtatatattttatctctagagtggtaggaaagtagagggggaaaatcatgacaaagctgcaacgtattcaaaaagtattggtagctaaccgtggagagattgcaattcgtgtgtttcgagcttgttcggaacttggattaaaaacagttgcaatctattctaaagaggatagtggttcttatcatcgctataaagccgatgagtcctatttagttggggaaggaaaaaaaccaattgatgcttatctagatattgaaggcattattgagattgcaaaaagtaatcatgtagatgcaatccaccctggatatggtttcttgtcagaaaatattcaattcgctaaacgttgtgaagaagaaggaattatctttatcggtccgaaaagtaagcatttagatatgtttggagataaagtgaaagcaagaacacaagcgcagctagcacaaattccagttatacctggtagtgatggtccagtaaattcattagaagaagtcgaaaaatttgctgaaaagtatgattacccgattattattaaagcatcccttgggggtggcggtcgtggtatgcgtattgtgcgtactagtgaggaattaggagaatcatataatcgagcgaaatcagaagcgaaagcagcttttggtaatgatgaagtttacgtcgaaaaattcgttgaaaaacctaaacatatagaagtacaaattttagcagatgaagaaggcaatgttgttcatttatacgagcgtgactgttctgtacaacgtcgtcatcaaaaagttgtagaaattgcaccgagtgtatcactttcagatgatctgcgtcagcgtatttgtgatgctgctgtgaagttaacgaaaaatgtaaactatttaaatgcaggaacagtagaattccttgtaaaagatgatgagttttactttattgaagtaaatccacgtgttcaagtagaacatacgattacagaaatgattacgggagtagatattgttcaatcacaaattttaatagcggatggacattcattacatagcaaaatggtaggtgttccgaagcaagaggaagtagttgtacatggatttgcaattcaatctcgtgtaacaactgaagatccgctaaataattttatgccggatacaggaaaaattatggcgtatcgatcaggtggtggttttggtgtgcgtcttgatacaggaaatagcttccaaggtgcagttattacaccgtactacgattctttacttgtaaaagttacaacttgggcacttacttttgagcaagctgctgcaaaaatggaacgtaacttaaaagaattccgtattcgtggtattaaaacaaatattccattcctagagaatgtagtaaagcataaaaacttcttatcaggagaatatgatacttcatttatcgatgcgtcacctgaattgttcttgttcccgaaacgtaaagaccgtggaacgaaaatgttaaattacattggtacagtaacagtaaatggtttcccaggagtagggaaaaaagaaaaaccaatattcccagatgctcgtattccatgtttaaaacattcagagccaatccaaaatggaacgaaacaaattttggacgagcgtggagcggacggattagtaaaatgggtacaggatcaaaaacgtgtacttttaacggatacaacattccgtgatgcacaccagtcattacttgcaactcgtattcgtacaaaagatttacatcaaattgcggagccaacagcgagaatgttaccgaacctattctcagcggaaatgtggggcggtgcaacgtttgatgttgcgtatcgtttcttaaaagaagatccatgggaacgattactagatcttcgtgaaaaaatgccgaacgtgttattccaaatgttacttcgttcttcaaacgcagttggatacaaaaactatccagataatttaattcaaaaatttgtggaatgttctgctcaagcaggcattgatgtattccgtatttttgatagtttaaactgggtggaaggcatgagagttgcaattgacgctgtacgagacactggtaaaattgcagaagcaacaatgtgctacacaggggatattcatgatccactgcgtagtaaatatgatttaaattattataaaaatttagcaaaagagttagaagcatcaggagctcacattttaggtattaaagatatggcgggcttactaaaaccaaatgcagcatatgatttagtttctgcattaaaagagacagtgtcgattccaattcatctgcacacgcacgatacgagtggaaatggtatattaacgtatacgaaggcaattgaagcaggtgttgatatcgtcgatgtagcagtgagttctatggctggtcaaacgtcacaaccaagtgcgaacacgctatactatgcgttaggcggaaacgaaagacaaccagatgttaatatagattctttagaaaaactatctcactattgggaagatgtacgcaaatactatgcaccgtttgaaagtggtatgaatgcgcctcatacagaggtatatatgcatgaaatgccgggtgggcagtatagtaatcttcagcaacaagcgaaggcggttggtttaggagatcgcttcgatgaagtgaaagtaatgtaccgccgtgtgaatgacatgtttggagatattgtaaaagtaacaccatcatcaaaagttgttggtgatatggcattatttatggttcaaaaccatctaacagaacaagatgttttagagcgtggacatgcgatggacttcccagggtctgttgttgaaatgttctctggtgatttaggtcaaccgtacggtggtttcccgaaagaattacaaaagattattttaaaagggaaagagccattaacagtaagaccaggtgaattactagagccagtagatttcgaagcgttaaaagaagaattattccataaacttggacgcgaagtaacgatttttgatgtagtagcatatgctttatatccaaaagtatttatggattatgaaaaagttgctgagctttatggaaatgtatctgtacttgatacaccgacgttcttctatggtatgagactaggtgaagaaattgatgtagaaattgaacagggtaaaacattgatggttaaactagtatcaattggagaacctcagtcggatggaaaccgtgttctttacttggaatttaacggtcaaccacgtgaaattatcgtgaaagacgagagtgtaaaagcaacagttgcacaacgtgtgaaaggaaaccgtgagaatccaaatcatattagtgcaacgatgccaggaacggtaattaaagtagttgtaaaagaaggcgacgaagtgaaaaaaggcgattctatggcaattacagaagcgatgaaaatggaaacgacagttcaagcgccgttcaatggtaaagtgaagaaagtatatgttaacgatggtgatgcgattcaaacgggtgatttacttattgaattagatcactaaaataagaaaagagctgtgtaaatacagctcttttcttattgcaaaaaatcccttgccgaattggcaagggattttagttttaaattattttgtttgtttagaagttgattcggcttctttggcattcactttacttcttgttcccagcataactaaatagcatagtacggcaaacaagcaagaaatgaatagagaatgtaacaatgccattgctaaactagcgtttgtaaatacaactaaaactcctactacagcttgaagtgtaacaaggataaatgaaataatccatccccaatatactacagattgctgcttgtaatggcgaatagcgagaatcatcgcgtatagtatccaagcgaaaattaacatcgctgcaactctatggcccatttgaacccattcatgtagttgagttggcataggtctgtttttgctacataaaggaaagtctggacaggctaagctagctcgttcgtgacgtactaaagcacctgtgtagacgacgatataactgtaaattgttacaccataaatatgaaatttcatttttttgtccataataagtgaacgtgcatcaaatttttggtcaatttcaaagataagacacgttaataaaatgacagaagcaaatgaaattaaggaaataccgaaatggatagcaagtacagctggcatttgtccccaaacaactgctgctgctcccattaatgcttgtgcaactaaaaatacgaaggataaaattgctaacgtttttgtttcacgcacatgtttataatatttccaggacaaaatacaaagtagagtgacaagaattccagctgatcctgatgttaatcggtggctaagttcaataatagtttccattgataaattagatggaacaaattcaccgttacaaagtggccatgatttaccacaaccttgaccagaacctgtttttgtaactaaagcgcctcctaataaaactattaataaatcaaggcttgtaatgactgctaaccatttaataaagcgttgcaatctctttcaccatctttctgctatgaagttattgcgaaatattttcattccattatgtatagaataaaacgcgctagttcctatgatatataaaaaataataaaatagcaaagaaatggagggggaaggaaagggagagaaaataggtgtaaaaacagggttcgcaaggaaaattttgggtgaaaaataggctattttgaaaagaaatggggagaatacgtgttaaataggacaaaatagtttattatagaaggtaacatcatgttatgataaggacaagtcagaatgaagttttttatattcgacacaaaaagttcatgttttcttcacaaaatgttcgggaaatatgatttaatatattggagtatgggcgtagattagtagtagaatgggttaacaatgtttctactgtaataatattgctatatagaagcgaattatttcatttgaaataggcgcaaaaagaaagatgaaagttttaagagggggttagagtgatgaaccatgcaacaagtgagctgcatgatgagtccgctgttacaagtgtaccggaaacaactcggttacaagatttaaaagcactcgttaaaatggggattgtaaactcaaatacacttactgtatttacaggattttggttggcattacactttaatggattaagtgtaatggacaatctggataagttattctttacaatcgttggttcaggattaattatggcaggggtatgttgtttaaacaactacattgatcgagacatcgatccattaatggaaagaacaaagacccgtccaacggttactggaaagtataaaccaggatttgcacttacatttggactagtcatattacttcttggttttgtatttttattattaacaacaccaatggcagtcttaatgggatttattggtgctttcacatatgttgttctatatagtttatggacaaagagaaagtatacactaaatactgttgtaggtagtatatctggtgcagttcctcctttaattggatgggcagcaatcgatccatctttaggccatccaattgcttggatgttatttttaattatgtttatttggcaaatcccacatttccttgcattagcaatgaaacgtgttgatgaatatcgaaatgcaggaattccaatgcttcctgtagttcatggatttgaaattacgaaacgccaaattatgatttggacagtatgtttattaccactaccattttatatgagtggactagggataacatttatggtaattgcaacactgcttaacatcggatggatcgttttaggattttatggcttccgtaagaaagatgacatcaaatggtccgtgcaaatgtttgtttattccctaaattatttaacaatcttatttgtatcaatgattgtagttacattcttctaagacaacgacataattggatttctttacgttgagatttactttacttaactataaagtacaatctaattcacaaggaaagtgggggttgtttgtatgaagaaacagtggcgactgctttcgttcgtttcactgctggctttactgttagggggatgcggtaaagcctttcaatctactttaattccgcaaggagaagtagcaaaaatgcaatatgatttacttctactggcgagtgcaatcatggtaggagtagtactagtagttactattattttcttatatgtaattgtgcgtttccgacaaaagaaaggtcaggaagattatattccagagcaagttgaagggaatcacaagctagaaattatatggacagttattccgattattcttttactaatcttagctgttccaacagttacatatacattcaaacttgctgatgtaagtgcgatggagaaaaagaatattgataaagatactatcgttgttgatgtaacagcgaatctttattggtgggaattttcttataaatcagaaaagatagtaacttcgcaagatttggtcatccccacaggtaagaaagtgtatttaaatttgaagggtgccgatattaaacactcattttgggttccatctttagcagggaaaatggatacaaatacagacaatgtgaacaaaatgtggttaaaggcagataaatcgggcacttataatggtttttgtacagaattttgcggcccatcacattctttaatgcaatttaaagtgaaagctttagatgaaagcgagtacaaaaaatggcttgctgatatgaagaagattgatgggaagaaagaagtagcttcaacaaaggcgcaagagggccaagaaatatttaataaaagctgtattggttgtcacgcagttggatctaatgatagtagaccaccttccgctcgtatcgcaccaaacttagcaaactttgcggatcgcgatatggttgccggtattgccgaaaacaatgaagaaaacttaaaaaaatggctgaaagatcctgaaaatatgaagccaggaaacaaaatgactggcaaatatggcaacttaacggatgatcaaattgatgcattaaatgcatacttacaaacgttaaaagttgaaaagtaaagagggactattcgcgaaggggaggttgaaaacgtgagttctgtagcaaaaaaacaggggatgggtgctgtcatatgggattatttaacgacagtagaccataaaaagattgccattctctatttaattgcaggtggattgttttttgtaataggcggaatagaagctctatttattcgccttcaattagcgattcctaacaacgcttttcttgttggggatgcttataatcaagtattaacgatgcacggtacaacaatgattttcctcgcagctatgccactcgtgtttgcatttatgaacgccgctgtaccacttcaaattggtgcacgtgatgtagcgttcccgtttttgaattcactcggattttggttatttttctttggtggagtatttttaaatttaagttggtttttaggtggagcacctgatgcaggatggacatcttatgcatctttagctttagcctctaaaggtcatggtgttgatttctatgtactcggcttgcaaatctcaggtattggtacattaattggaggaattaacttccttgtaaccattattaatatgcgcgctccaggaatgacgtatatgcgtatgccgatgtttacatggacaacatttgtaacatcttcgcttatattattcgcttttccgccgttaactgtaggattaggacttttaatgttagatcgtttatttggaacaagtttctttaatccggcattgggcgggaatacaattatatgggagcatttattctggattttcggtcatccagaagtatacattcttatactcccagctttcggaatattctcagaaatcttcgcaacattttcgaaaaaacgattgtttggttattcatcgatggtgtttgcgactgtattaattggatttttaggatttatggtatgggcgcaccatatgtttactgttggacttggtccagttgctaatgctattttctcagttgcaacaatggcgattgcggttccgactggtatcaaaatattcaactggctctttacaatgtggggcggaagtattcgttttacgacaccaatgatgtgggcagtagctttcattccatcattcgtaatgggtggagttacaggggttatgctagcatctgcaccagctgattatcaatttcatgataactatttcgtagtagcacattttcattatgtaatcgttggcggtgttgtatttggtttacttgcaggagctcattattattggccactgatgtttaataaagtattaaatgaaacattaggaaagataacgttttggctattctttatcggcttccatttaactttctttattcagcatttccttggcttgattggtatgccacgccgttactacacatatcttgaagggcaagggttggaaatggggaatatgattagttccatcggagcggtgtttatggctcttggaacgattgttcttctattcaatgtaattaaaacaacagtatcaaaagaaaaagctggtcgtgatccgtgggatgcacgtacattagaatggacaatgccagcaccgacaccagaatataactttaaacaattaccatttgttcgcggattagatccgttttggattgaaaaacgtgaaggtaataaagaaatgacagcagcggaaccagttggtgatattcatatgccaaatccttcgttttcaccatttgtcatttctttcggattgtttatagcggcatttggtgcgatgtatatgcagggcggaaaagataagttctggttattagtagcaattattggtttaatcattacatttggcacaatgttcctacgttcagtaattgatgatcatgggtatcatattcataaagaagatttagaggataaggggggcaaggcataatgcatgtagatgaaaaattaacgaatgaaacatttccagcagagcctgaaaaagcaacccttgaagggaaaaataagtttgtcggtttttggctatttcttggaggcgaaacagtgttgttcgcttccttattcggaacatatttagcgttaaagaattctacaaatggtggaccaacatctcaagagatgttccaaatgccactcgttttcattatgacgatgcttttattaacgagtagcttaacgagtgtatatgcgatgtatcacatgaaaaactttaactttaagaaaatgcagctttggttactagtaacagtattgctaggtttagggtttttaggatttgagatatatgagttttatcattatacacatgaatttaagcatactatgagaagtagtgcctttggctctgcgttttatgctcttgttggtacacatggactccacgtattgtttgggttatgttggattttaacattaatctttagaaatgcgaagagaggtctaaatttatacaatgcaccgaagttttatgttgcatcgatttattggcactttattgacgtagtttgggtgtttattttcactgtagtatatttaatgggaatggtgggataaacaatggcgataaagcaaacgaataatcctaaagttgatcttgtttatcggaagagaaaaagtgcggaggaaatgaggcatcaagttattacgtttgcattaatgatttttttaacattagttgcatttgtagcagtagcgtatccaaaaacttttagtccgattttctctgtaccgtttattttactattagcagtggtacaagtaatttttcaattgtattattttatgcatatgagtcataaaggacatgaagcagcaagtttctttctttactctggtctgctaatagggttaattacaattttagcttttatgacaattgtgtggatttgaaaagtgaaaaataagggagcttgtgttgtcacagctccctcttcatattatgagataaccttacgaaggcaggtgtgaaaatgagtaacttgtggatatttggttttcaggctttatggagtccaatctttttattatttatgctttcgattcttattgggtacttcttaattattggaccatatagaatgcgatttgaaaatgcgacgaaggtaagtaagaagcaaattttttattttacgactggtattgttcttttatattttgtaaagggagggcctattgatttaattggccatattatatttagtgctcatatgtttgaaatggcagtcatgtatattgcagttccaccgttactgttgcttggtataccaatttggttatatcgttacattacttcttttaagttcgttcaaattatattaaaggcatttgctaaaccacttattgcgttgtttgtatttaacggcctgttttctttttatcatttaccagttgtttttgatacagtaaaacaaagtcaaatagctcatcctatttgtctcgctatattgttttttacagcaatcatgatgtggtggccgatgttaaatccattaccagaatatcaaacgttaagtgatataaagaaacttggttatatgtttgctaacggcatattattaacgcctgcatgtgcgttaatcatttttgcgacagccccgttatttgcaacgtatacggatccggctgcttggatgaaagcgatggaactatgtgtaccagcgggcactttatcagatttaaatataacgggaccagaatttttgcactggatgccagtcgtacaagatcagcaaactggtggtatcataatgaaaattgtccaggaaatagtgtacggtacaattataggctatgtattctttagatgggcacgtagagaacgtgaaaaggataaggagcagttgcaacaattgccgccgtatttacagattaagtaaaaaagtgtatgggattccatgcgctttttcttttttagctaccttaaaaagattgaattttctaactttttatgttaagttagtgtaggcgtgtactaaaagtggagataaaatttactactagctttcatgcgtaataattccatatgtagtgcaagttttttagagagttacaaatatatattgttatctttaataaacacgaactattttaagggggagtttaaatgggtagtagtggaagtatggtaaagccgattagtggttttttgacagcactaattcaatatccagtaccagtagtagaatcgcgtgcagacattgataaacaaattcaacaaatcataaaaacaattcattcgaccaaatcaggttaccctggtttagaattgatagtatttcctgaatatagtacacaagggctcaatacaaaaaaatggactacagaagaatttttatgcacagtgcctgggccagaaacagacttatttgctgaggcatgtaaagaatctaaagtatatggtgttttttcaataatggagaaaaatcctgatggtggagagccatataatacagcagttattattgatccacaaggtgaaatgattttgaagtatcgtaagctaaatccttgggtgccagtcgagccttggaaagctggagatttaggcttacctgtttgtgatggacctggaggaagtaaattagctgtttgtatttgtcatgatggcatgttccctgaagtagctcgtgaagcggcctataaaggtgcaaatgtcttaattcgtatttctggatatagtacacaagttagtgaacaatggatgctaacgaatcgttcaaatgcatggcaaaatttaatgtatacattgtcggtaaacttagcgggttatgatggtgtattttattactttggtgaaggacaagtatgtaattttgatgggactactttagtacagggtcatcgaaatccttgggagattgttactgctgaagtatatccagaactagcagatcaggctagattaggatggggattggaaaataatatatataatttaggttcaagaggatatgtagcaactcctggtggggtgaaagaaaatccatatacgtttgtaaaagatttagctgaaggtaaatataaggtcccctgggaagatgagattaaagtaaaagatggatctatttatggatatccagtaaaaaaaacgattcattcttagggaagggaaataaaacaagcgcatcatattgatgcgcttgtttttgttaatcaataatttgaaattcttttaactctttttcgacattttgtaggagttgttcgcttttttgaagtacattcgttgggaaagtctcatcatcaccatattcaacgccgtgaggataataatgttttcctaataagggggggagtagttttacttcagcgtgtctactgccaatgtcaccttcaacagcaactccttgcactcgtaaataataaacatcctttaatatttcaaatttataatcgtatgtaactcgttcataatcccactgtccggcaagtacgaagtggttgttttccatgatttcagttaaaagagttaattcaacgacggctccattaaatttcgtatttgtaaattgcatataatacctccttttttaatgttacaccattatttttataatagtatgaataataagaaagtgcaattcatattgagagaaaagggataatccagacttttttcacaaaaatatgatatagtgaaaagagtacggtacacacaaaaagaaagaaaaggatttgtgtatatctcaattttatgttttgttcaggaggtatatcgtttgaagaaattattgcgtatcgtaatgattacatttttaattttagctgttgatttatacgggaaattactcgtttcacaatatatattaaccccatctcaatcaaagcaagaaaataaaattgtgaaaaagaaaaagcaaattaaggaagactcctcagacactgttttaaatatgattggtgaagactctgaaaacctattagcgaagtggggagaaccctctcgaatagagccatctgcatacggatatgaatggtgggtatacaaccaggatttaactcagtatgttcaatttggagtttctgaacgtaaagttgtaacggcatacgcagctggtgaacaagttaaggttccaccttattatataaatgaaaaatatgaagaagtatataaaaaaagtccgctttcgcatgaaatttcattaaaaagagggaaaaatagttatcaatttgagctatctgataccgaagtcatggaacaaccgttaatacctgtagaagatggatgggcgcaattgtattttgatcaatttacacatgagcttgttggtgttcgttatatggatgatgaaactttattacgccaaagaccgtatcagctcgtttattcaggtgaattaatagcagaacaaccattgactccagaaaaaataaaacaagtagaaaatgggaatatgcaacaaatttttgatttaacaaatatcattcgaagtcgtcataaattaccattattaacatgggatcaggaaacagcagatgttgctgttggtcacagtaaagatatgaaagacaataattatttttctcatgactcacctacattaggtacactaggagatcgtttgcagcgcgggaaagtaggatttcaacttgctggtgagaacatagcggcgcaacatagtgatggaattgcggcagtgcaaggttggttaaatagtgaggggcatagaaagaatttattaaatgaacaatttacaggattaggtgttggtgtatacgataaattttatacacaaaactttattcgaaaataaagcgaaactgtaagcggtggggtgttacatcacctaattagttacttcgtattcactgaattgtaggtgggaatctgaccgtatgcaaatagcagaaaaaaaggtgcatgaatcgtctaaaaataggcgaaccatgcgccttttttttcttactatatagtagatatacatggagaggtgaggattatgccaacaacaaaaggaccgttacatccatcggttcaacagtttaaagaatttgtaaaccatcaccctaaaatggttcatgaggttagaagtggtcacaaaacatggcaacaattttatgaagaatggtacttacttggtgaagaagatccaatatgggcaacttatagaccggatggagcgcctgcgttttcttcggtaaaagaaaataaaaaagaaaaagataatcgaactgaagaggaaaaaactgctgatgtgatggggcaaatgctttctttttttaaaaagttggacgtggaacaaatgcagaaccatttagccaatgtgacgagtgcaattgggagcgtgcaacaagttattcagcaatttcaaggtaaccgtacgcagcaagagcaaagtacttcagaaaataacccgtttttctttcaaaaggattagggggaaagatgatgagagcagaaattatggagtttataaaggctgatgaggatttatctcgttatattagagagcaaccgtactggtatagaaaattaacacgaaatcctgaagaaaaagaggcttttgagttagcggcgatgcaacatttcaaaaaaacgataccagataaagtggaaaagtttcaaaatcaattggccgttgcttcgatcatgattgatatgtttcagtatatgaagcaacaaaacgcaacctaattggaagtgaaaaatatgtccgtcatgcagaacttttgttacaatagaagttgattatttaaaaaggagttgcagcatgacggaaatttgtttagtacgacatggacaaactgattggaattttcaagaaattattcaggggcgagaagatattccgcttaatgaagttggtaagaagcaagcgagtcaaagtgcagctgctttacaagaagaaacgtgggatatcattataagtagcccgttaattagagcgcaagaaacggctaatgaaatcgcaacggcagttggattacaatcgattttattagatgagcgatttgttgaacggaattttggagaagcttcagggaagccggttgcggctgttagagagttgattgctgagggtaaagtagaaggtatggagcgagatgaagagattgtagctcgttgctttgctgctttagaagatgttgcgacaactcattttggcaaacgtattattattgttgctcactcacacgcgataaaagcgattttacatgccattgaaccagatgaaattacatttaagacaccattaaaaaatgcgtgtattagttatgtgaaacaaaatagtggaaaatgggatgttcttaaatataatatagcggaacatattaatgtataagtgtgtacggatatagtgtaaaaatagttacgttatatctttcttttgagtaagtcacttcaattagtagttctaatctaaatgtggtatgatggatactcggaggtgtctctcatgattgtagcgacgctagaaagcgtattaatattagataaggcagagcagcttgcaaaagcgattatctgttcagatatagcagaagattatcgtaagtattatagagaattacatgaagatatggaacttcagacgctaattcagcaatttacagcgatgaaagaacggtatgaggaagtacagcgttttggaaaataccatcctgactatactaccgtgtcgatgaaaatgagagaattaaagcgttctgtggacttacatgataaggttgcagcttttaaaagagcagaaactgctttgcagaagttattagatgaagttagtgtagcaatcggttcggaagtgtcttcttccattaaagtgccaacaggaaatccattctttgatgctggtggctgtggtggaggttgtggtactggcggaggttgtggttgtaaaaaaacggggtgatgtaccccgttttttagaagttggaagaaaacgtatacagagtttgtcctgtaatgttataaatttctgattggttttcatagaatataaaatatatgtttttaaaaggagaagatggagaagattatgttcgggcaacgacaaagtatgattgtttatttacattcattgaaacatgccaagattttaaggaaatatggtaacatacattacatatcaaaacgattaaaatatgctgtagtatattgtgatatggaacaaattgagcatatgatgcataagttgaacaaacttccttttgtgaaaaagatagaacagtcgtatcgcccgtatttaaaaacggaatttgaaaattcccgtcctgatcgagcaaaagaatacgattatagctaatagaaaaaatcccctgctaaatttagcgggggatttttcacttgaaataacgtgttatttcatcggaggaatgaaattgttcattcgtaaaataccaattaaatgattaaaaaatagttctttttctgggaaagttgtagatggttttacagtaaaggtagccacttttttcccgagttgttctgccgtttcttcaaataaaatgacacgtttactttttttattttcaaatacaggaatgccttcacgacatatgtataatggttggaaatcaccagtagtagttggttttaatattacaacaagcgaacacacttttttatcgttttttatcgtttcaaattgtaacatatgtgctatacgttcttgatttgttttggcaatttcaagtaattcatataaatcagagtagccttctccaagttctataaagcgttgaatcatatcttttcctcctctttcttttactgtaccatttcactttttaaatgaaaagcacacaaagaaaaaaaaccctgcatagcagggcccttcttatactagcatgtactagtaagaaggcaaagggagaggagaaaccggaggaagaacttatggggaaacgtaagtcttctccgcggttggcaacaacatcgaaggtgatgttgttataattatttatgtccaatctaaatgaagatatacataatgaaattaaattttatgttgggctttttatttttcttttttttattttgtgataggataaaaaagataaagtggaactaatatacatattgggttcatattagtgaatgatgagatgaatacataaaaataacgagaggttatttgaggccgagtttttctatagttaggtgaatgtggtttgttaacggttaccgaagtgggaatggctttctataatcgctcgatagattgaaataaaggtagtgacaacagatgagagtagtttcaggaaaatgtaaaggacacccacttaaagcggttcctggtaatacaacacgtccaacgacagataaagtaaaagaatctatttttaatatgataggtccttattttgatggtggtatcgcccttgatttatttggtggtagtggtggtcttggaattgaggctttgagcagagggatcgataaagcaatttttgttgatcgggatagtaaagcgataaaagtaattcatcaaaatttagaaagttgtagagtacaggaacaagctgaagtatatcgaaatgatgctgaacgtgcagtaaaggcgttaataaaacgtgaaatgtcattcgatcttatattaatagatcctccatataaagagcaaaaaattgtatctttaattagtgtaatggatcaacatggattgctacatagtgatggattaattatggcagagcatggtaatgatgtagttttacctaattcaataggaaggcttgtaaaagtacgagctgagaattatgggattactgcaatatcgatttataagtatgaaggtgaggggacagaatgacaagtatagcgatttcttcaggaagttttgatccaattacccttgggcatctggatattattaaaaggggagcaaaagtatttgatgaggtgtacgtagtcgttttaaacaattcatcaaaaaaaccattcttttcagttgaagagcgattagaactaattcgagaagcgacaaaggatatcccgaatgtaaaggtagattcgcatagtgggctattagtagagtatgcaaaaatgcgtaatgcaaatgcaatattacgtggtttacgagcagtttctgattttgaatatgagatgcaaattacttctatgaatcgaaaattagatgaaaatattgaaacattttttattatgacaaacaaccaatattcatttttaagctcgagtattgtaaaagaagttgcgaggtatggaggaagtgtagtggatcttgtacctcctattgtagagcgtgctttaaaagaaaagtttcaaaccccgttaaagtgaacggggtttttctttatacgtgcgcaaaaataataaaataacatataagtatagacaaaataatgtaaaaattggtccataatgtataaaagatgtccaaatttcatgtagtatagaaggatgctcggataaaaatacaggaatatcttttggcataggtgagaaagaactcactttctcataaaatggtgtccaaaatacaaatgtaaaaataggggcaagaatactttgaataattcgtgcgaaaaaatagggtttaaatcggatatctgtttcagctaatatactagcaacttgtgcctgaatagaaaggccgctaaatgctaaaatgaagcttgttaccatagcttgttgtaagagcggtgtttcatttatttgactaatcatttggcttccgagtgtcatttcgaaaatacctgataatataggtatactaaaatctgtacttagttggaagaatgataaaatatgttgcataataaaagaaagagctgctgtaatgtggaatacagtaatcattttatttaacacagagaataaaataataaatccgccaatcataagtaatgtttgaatagaagaaacaatggcatccccaagtaatttaccaattggtcttttttcttgtaagcgtgtctcgtgaagaattaaaaaagggttttgaaagcgacgtttttttgtagtgtgtgtattatttttgtaagcggtattatcgccgtaaaaacgcataattaatccgacagcaaagttactgaaataatgggcagcggctaatataattcctaatttcggattattaaaaaagccgatagacacagcaccgaaaataaaaagtggattggaagaatttgtgaaagaaacgaggcgctccgcttcaatctgagttaaaagattgctttttcgtagtctagcgcttaatttggcgcctgcagggaaaccagaagccattcccatcgcccaaacaaatccgcctatccctggaacgcgaaaaagtgggcgcatgagtggttctaatataacgccaataaattttacaacaccgatactaattagaagttccgcaatgatgaaaaacggtagtagtgaagggaatacaacttcccaccatatatttaacccgcgaatagaagcttgcaaagcggcttgggggtggagtacaagagaaaaggttaaaaatagcgttgatatggtaaggaaagcggttttccatttttcatacatgtaagtaaatccccctttgtcccaaaaaacgttcatttcagtatacgtggatacgtagtgaatttagaccataagtatgaaaaaggaatgaaaaaaattaaagggtgagaaaaatgaaagaaccaaagattggtttagcgcttgggtctggaggagcgaaagggtttgctcatattggtgtaataaaggttttaagggaagcgggtatccctattcacatgattgcaggaagtagtatgggggcgctaataggtacgttttatgcggcaagtagtaacgttgaaagattgtataaattggcatctgtttttaagcggaagtattatttagatttcacggtaccgaaaatgggatttattgctggaaaacgtgtcaaagatatgattaaaatgtttacatataataaaaatttagaagagttagatatcccgacggctgttgtggctactgacatattgaagggggaaaaagtggtttttacaagtgggccagttgcagatgcggtgagggctagcatatctgttcctggagtgtttgtaccagaaaaaatagatggaagattattagtggatggtggagtcattgatcgcatcccagtatcggttgtgaaagagttaggggccgatattgttatcgctgttgatgtatctccaattaaggtgaatggcgatgttacgtccatttatgacgtaatcatacaaagtattgaaattatgcagcatgagcttgtaatgaatcggcaaattgcatcggatttaatgatgcgaccagctgtagagcaatttagttcacgtgcttttacaaacattgaagacattattcgagttggagaagtagaagcagaaaaacatgtttcaaatatttatttattaattgagcagtggaaggagaaacataatgtttaagcgttttcggtttatatatgcaatcttaataggggttatattggcgatgttacttgtttacgtacgtttaccgtattatataacaaaaccaggaatggctgccaaattagagccttatgttcaagttgagggtggaacgaaagaatctggtgattttatgcttgttacggtttcaatgggaccagcaaatgtggtgaatttaatagcggcacagtttaataaatatacacatatttcgaaagcggaagaaatattgcaaaaaggtgagagtgatgaagaatatcaatttcgccaaaattatgcgatgaaagattcgcaaaatgcagcaatttataatgcatataaacgtgcaaatcgctcagtatcttttgaaaataaaggtgtattagttgctggtgtggcaaaaggaatgccgtcagaaggaaagcttaagcttggtgatgttattatagctgttgacggaaaaacatttgaaaagacggagcaatttattgaatatatgacagggaaaaaagaaaacgatgctgtaagtattgagtacatgagaaatggaaaacaattgaaagagaatttaaatgtaaagacgattcctaatgggaatgggcgtgtcggcataggtgtttctatcgttacggaaagagaattagtggtcgatccgaaagtgaaaattaattctcatgaaattggtggaccatccgcaggtttaatgttcacattagaaatatataatcaacttgtggaagaagacttaacgaaaggacatgaaatagctggaacaggtacaattaatgaaaaaggagaagtgggcccaattggtggtataaatcaaaaagtggtggctgctagcgatgccggggctgaagtgttctttgcgccaaatgaaaaaggtgcggagaaatcgaactataaagatgcacttgagactgcaaaggatattaaaacaaaaatgaaaattgtaccagtagatacgctggatgatgcgttaacatatttagaaaagatggataaggaaaaaacctctctgaaatagagaggtttttttataggaattttgtagttgtttcatcatagcgaacaggatggtgtgttatatcctgttttaatagttgtgtgcgtaacggttcgtgcatgatggagaaatatacagagtttgcttttttctctatatctaaagcggcatggtcgaatgtttttgtatgagtaaggattggaagttcgatttttttcttgttttttgaaaggtaagtttgtcctttttgtgacatacctagcaggcgaatatatggtgcgtgttgttctatatttgcgctacgtatttcctcttttgttgtgtttgttaaaatgtgtgtacaagctctttgtaatctagtccatgtataacgttttgtttttaatgcttccatgaatgaatagaaggaggaactgttttgtatttttgataaaatacgatgctctaaaccttcttctatttcatatatatgtcgtaagtcccctggagacatcgtcatgagtctatatttaaaaaatgaaaagtattgttcccaattatgtaatatcccgtaattttgtttgtaatttgctaaaagcgaagtggttgcctgtgggagaaaaggttcaattgttgtaaatgatccttcttcgctaaagagttgttttcggatgcttgtcgcgcttgcaatatgttggtcattaaatgtttcatcatgataatgagaggcaaatctttttatagtttgagcttgtatagagctattttgtgacagaattgctttcatatattggaagcctaaaatattatttggttgtgacatatctatgtttttttcagatgttaaaatgtgtgagaaagcatccgatgttgcttttgcataactattaccagcgtccatgaattgttttacaaggtagttaaaagtctcttcttcgtttttttgtacggagatggtattataaaaattttcgatttgtccatcctcactaccgaaacaaatttcagaaacacgtagggcatttaaaatggaaatagcaccatttgcgaaggtttcagccttttgtgttgcaaagacgtatggaagctctacaacaaggtctacgccgtttgctaaggccattttagtgcgataccatttggaaatgagtgcgggctcaccacgctgtaaaaaaggaccactcataacggcaattattatatcggattgtgttaacttttttgtctgttgcacatgataaagatgaccgttatgaaaagggttatattcaacaactataccaccagcttttatggtaatctctcctttcgatgtagcatctttttgaaaaacgtgatactctatatattatttactatgatgacttcattatagtgtaaagaaaaaacattgacaaatataaaatggctagctataattttgtttgttgccttgaggtgatatgatatgaaatggtccatccatcaattgaataaattgagaaataaaggattgacattggatgagatggtagatgtaagtgagctaaaagaggtcgagaaagatattcgtgaaattaatcctgttcatgtaacgggaagagttgattttggctccggtaagtttacgtttcatctacatataactggaagcatggttttaccatgttctcgctctttagtagatgtgacattaccatttgacattaaaacaactgaggtgttccaaacttcacaagaagaatttgaaactgaagctgaaattcattctttagaaggagaagtacttgacttactgcccgtaatcaaggaaaatatacttttggagattccaatgcaaattttcagtgatgatgtttctggtggagcaccgatgcaaggtcaagactggcaagtgatttcggaagaagacaaagaaaagactgttgatccaagattggcaggacttgcaaagttttttgacaaataatcggaagactggttcaggccttcatatgaaaataactatttcttttaaggaggtgggaagaatggctgtaccttttagaagaacttctaaaacagtaaaaagaaagcgtcgtacgcatttcaaattatcagtacctggtatggtagagtgcccaagctgtggtgaagcgaaattagctcaccgtgtatgtaaagcatgcggtacttacaaaggtaaagaagtaatcagcaagtaattgcgggaaaataaacgcagaagatatcttctgcgtttattttttttgtcttaatctttagttgttgtattctatcttttctagtaactgcatatgcttaataaaaaatgcatagggaggactagagagatggcgacaacaagacaagatgcttggactgatgatgaagatttgcttctggcagaagtagtactccggcatattcgagaaggtggaacacaactttctgcctttaaggaagtggggaaaaatttatctcgtacaccagcagcatgtgggtttagatggaattcttacgtaagaaagcaatataaagaacgtattgaggaagcaaagcaacttcgtaaagtagaaaattatgaagtgaaagagacaaaggtgttagaacctacgtcaattacgttgaatgatgttattgatttcttgcaaaattataaagatgaaaactctttaacggtgttgcaacaacaagttgaatcattacaaacagaaagagagcgtcttctggagcgattatcagtatatgaagaagagtatagaacactacttgattatatcgatcaaaaaagaagtgtaatggtagcggaaagaaacaatgctcgctcgaatgagaagttagagaagcttaagaaataaaaaacagctgttatacagctgtttttttatttcttaagccgattcttcgtttgtaaccgcattcaaatttgcttctggatgccaaatataaaaatctccatcagttactgatacggggttgaaatttaatttatcccaaaaaccagctgaatgaatacgtgctatcgttttaataggaaattgcatttgtttcgcatgatttacaagcatttgcccgaatccttgtttttgaaaagttggtaatacttcaagtttataaagttctaggtagggacctgtaatttcgaatggttctccgccgtttcttttcatatatagactcatacgtgcgattagtgatccgccataataaataccgtaaaatggagattcactgtcgttttcaataatgtttgcttgtaattcttccagcatagatagttcctgggctccgcaccctttaaattttttgaattcatctaacgttttataattgatgagcaagcgctcaacttttgggaatcccattacatcacatccttttcttgtctcgttgaatgcagaaaagtaaaaatatttataataatagtataactcatttttttatttttatgaagaagatagtatatttctttttttatttttttgaggatttgctaaactaagagtagaagcgtattaataggtggtacatacatagtgaaaaatgagagtatatttgttgggcagaggacagcggaattatagggcgtgctcaggtgctttaaaaagatataaaggggggaaggcaagggcacttagtgtgaattccttgtgtgaaaatgaaaattggaattgtcggaccaggtgctattggtctattgtatacattttatttacaaaaaaataaccaagatgttacgttgtttacaagaacagctaagcaagctgaagaattaaatgaaacaggtgtaacttgtattagagatggaagatgtgaaacagtatatccatctgttttaccgatagaaagtatggtagcgcaaaatttagattatatatttattgctgtgaagcaatatcatatagatgacgtactaccgtttgtggaaggggcatcatcattaatctttttgcaaaacggaatgtcgcatcttcaaaagatgctgaacatagggagtaaaaatatagctgttggtattgtagaacatggtgcgaaaaaagagggagggcatatcgttcatcatactgggataggggtaacaaaatttggagtggtttgtggtcaatctatacattttaaaaaaatattcaattattttcctgttgcttattttccagttcaaatagaaacggattgggaagagattatgcataaaaaattagtagtaaatgtatgtatcaatccgttgacagcactattgggagttaagaatggtgaattaatcacgaatcgttttttttatcaaatgatggagcaagtgtttcaggaggcagcatttcttattagaggagaaaaagaaatggtatggcaaatggtacgaaatgtgtgtgaaggaacgtctcgtaatacatcttctatgctagcggatgtaagagcgagtagaaagacggaaattaatgcgattgttggatatgtattagaagaagctaagaaacagcaacgaccagttccgacacttcaatttttgttcgatgcaataaaaggtttagaaacaagagtataagtgttattctttgcttttacgtgaaacattgactacaatgtggattggtgagagaactggatacgaaaggaagaattatatggagataaaagaaatctctgttccgcaacaaggtattgtagcggactatatgaacggtaaaaaagagatacagtcatgttttgattatatgttaacagaagatgcttttaaacaacgtttacatgatttgcgtgaaagggagtttttccgccaagatttagtagcgcatttattagaatataatacaaaattacaagcgggagaatctacacttcaaaatgtaaaagcgcttggagatgaaaatacatatgttgttatagctggacaacaagcggggttattaactggaccgctttatacaattcataaagttatttcaattttacagcttgcaaaggaaaaggaagaaagtttaggagttaaagttgtccctgtcttctggattgcgggtgaagaccatgatatggatgagattaatcatacttttgtagcgaaaaataaaaagatgaaaaaaactattttttatgaccgtaatccgaaaaaggcaagtgcttctgagtctgaactttctgttgaagattgtagaaattggattgaagagatttttaaaacatacccagaaacaaattttacaaaagatgtattaaaatttgttgatgatgctttgaaaaaatcgaatacgtatgtagatttctttgctcatcttattacgaaaatctttgctaattctggtttaatccttgttgattcacatcatcctgaattaagaaagttagaaattccatttttcaagcgaattataagtaagtataaagaggtacaagagggccttcgtaatcagcaggaagtaattaaagaactaggatacaaaccgattattgaaacgaagtctcatgcagtgcatatattcatggaaatagataatgaacgagtattgcttgaagagcatcaaggtaagtttgttggaaaggatggggcgcattccttttcatacgaagagttgattgaagagatggagagaaatccggcacgttttagtaataatgttgtaacacgtcctcttatgcaagagtatgtatttcctacgctcgcatttattggaggtccaggggaattagcttattggagtgaattacagcaagtattccatactgtcggttttcaaatgccacctgtcgttcctcgtcttacaattacttatgtggagagagatatagcgacagatttattcgatctgcaattgagagaaattgatccgtttttaaatgatgtcgataaactgcgtgaaaactggttgtttaatcaaatagaggaaccgattgatgatcattttgaaaaggcgaaaaaagaaattgccgatattcatacatctttacagcaatttgtaaagaaaatagagccagggttaggtgcgtttgcagggaaaaacgaattgaaaattaatgaacaaattgaactgttggaaagaatgttgaaaagaaatgttgagaaaaagtatgaggttcagctaaataaattccgccgtatacaattcgcacttcgtccattaggtgcgccgcaagaacgtgtgtggaatgtatgttattatttaaatcagtttggtttggatttcgttgatcgtgtaatggaaaaccctttttcttgggacggaaaacatcatgttataaaactataaaatcttgctctttggagcaggattttatttttattccgttgaatttactgtgaagtgatttttttctgaattatcaatcaaaaaaatgttagatatggcaattgtgttggatacttaaatatatgacaaaatagcacaaaatgtaaacgtattattcgctttttcgacagttttttatttaaattcccgcaaaagatgataaaatttagtatataataaaagaaaatagcgatttgtatagtatgttgcctttgttggtaagttaaatgagtcgttctttcgtattatttcattctctaagcgtgaaatatgtgtttagaggaagggatacattcaacataattaattggaaaaagagtaggtgcaacaatgtttaaacacgtaacagtgcttttaaaggaaacagtagacggcttagatataaagccagatggtacatatgtagattgtacactggggggaggaggacatagttcttatttattatcccaattaactgaaggtggaaaattaatagcgtttgatcaagatgagatagcgattcaaaacgcgaaagaaaagttctcttcatacggtgaacagtttataacagtaaagagtaacttccgttatttagctgaaaaactgcaggaaataggtataacagaagtagatggtattttatttgatttaggtgtttcatccccacaattagatacaccagaacgaggctttagttatcatcatgatgcaccgctagatatgcggatggatcaagatgccccattaacagcgtatgatgttgtaaatagctggtcatatgaacaacttgtaaggattttcttccaatacggtgaagagaaattttcaaaacaaattgcaagaaaaattgaagcttatcgtgagaataaagctattgaaacgacaggagaattagtagagctaattaaagaaggtattccggctccagctcgtagaacgggtgggcatcctgctaagcgagtgtttcaggcaattcgtatagctgtaaatgatgaattaaaagtatttgaagaagcattggaatctgctattgagatggttaagccaggtggaagagttagtgttataacattccattcattagaagatcgtatttgtaaaacaacgtttaagcgaaatagtacaacgccacaattgccgccaggattaccgattattcctgatgaatttaagccgaaattaaagcttattacaagaaaaccgattttaccttctgatatagagctagaagaaaataatcgtgcgcgttctgcgaagttgagaatcgctgaaaaacgataaaagggagagagaggtatgactaatttagctgtaaagtacaaacaacaagcgcaagaagaggtgcaaattcaaacgcccccacagcagatggctaagccgaaggttaaagcgaaaattacaagaatcgaaaaactgttgtatgtagcgtttattggctttttattgtatgcctgtgtcgcgtttattggaaataaagcaggcctttatcaagttaatgtagaagcagcgacgatagaagaaaaaattgtacagcagcaaaaagaaaatcaagaattacaagctgaagtagagaagttaagtcgctatgaacgaatcgctgaagttgcaaaaaaacacgggctagaaattaatgcgaataatgtgaaaggcctcaaataaggcaataggtgtgaaggaacgatgaagaagaatatgactaaatttcataccaataagggagcaggttattttatgatatttttcctcctgctctttttgctgttattagcccgatttttttacatacaatcaacaggaacagttcataatcaggatttagatgcacttgctaaacaaaagcatagtaaaaaaggagttcttgaagcgaaccgaggaaccatttatgatcaaaacggtcatgtgttagcgcaagacgcaaactcttacaaaatggtagctgcactaaaaggtgctaactcagttgagaataaagaagatactgcaaagaaaattgcaggagtacttggaaaaggcgaagaggatattttagcttctttaaataaggaaggtagaagtcaagtcgaatttggaacgttaggcaaggatttgacgaaagaaaagaaggaacaaatagaagcgttgaagttgccgggaatatcttttattacagaaaatgcaagggtgtatccaaacggtgattttgcatcttacgttataggtcatgcaaaaccaaatgagaatggaacctcggtaggtcaatttggcatagagaaaagcttggataaatacttaagtgcctcgaacggagaagtagcatatacaggtgatcgtaaaggtgtgtcccttgatgggggaaaagttaatgtaaaggcacctaaaaatggagataacgcttatttaacaatcgatcaacgtgtccaaagttatttagaagacgcgatgaaagcagcaagtaagcaatatgagccagaaagtttaatagggattgttgcagatccgaaaactgggaaaatattagcgatgtctactaaacctagttatgaccctaatgatcgtcaaattaaatatttctttaatgacgcaattgccaatgcatttgaacctggatcaacaatgaaaattttcacgttagcggcagctattaatgaaggtgtgtacaaaggccaagattattatcagtccgggacatatcaagtcggaaataggaaaataaaagatcataacggtggtgctggttggggctctatcacgtttgatgaaggggtagagcgttcttcaaacgtagcgtttgcaattttaggagatcaaaaacttggtccagaacgtttccgaaaatatattcatagttttggattagatgaaaaaacgaacattgatttatcaggtgaaggatcgaatacaattttatttgatcagcaaatacaacaagtgacaacagcttttggacaaggttccactgtaacaccaattcagcttgtacaagctgcaacggccattgcaaatgatgggaaaatgatgaaaccttatgcaattgataaaattgtagatccgataacagacaaagtaaaattagaacataagccagaagaagtaggaaaacctgttacaaaggaaacagcagcgcaagtaagacaattattagaacgtgttgttacatctccgaaaggtacagggacagcttataaaattgatggatattcagttggtggtaaaacaggtacagcgcaaattccggatggaaaaggcggctatatgacagggagacagaattatatattctcattcttaggtatggcaccaatggacgatccacaacttgttgtgtatgtagctgttaaacagcctaaattaaaagatgatgagaacggtgcacaaccgttagctgatatttttaaatatgtaacaaaaaatagtttagagtatttaaagattaagccaaatgaagttaaagatccgaaaaaacatctgaaagaacaacaaactactgttccggatgtaaatggtaaaacgatggctgaagcggggaaagcgattgataaagcaaaacttcgtccaatcgtactaggtgaagggaaagtacagcaacaagtaccaaaagcgactgaacaaacattaaaaggcgaccgagtcttcttggtaggagataagcctacaatgccaaatatacaaggatgggcactgcgtgatgttatgaatttagcgaagacattacagcttaacttgaaaccttctggtacaggatacgtaacagaacaaagtgtggcggaaggaacattattacaacctggtacagaattaggtgtcacactcgtaccgccactcgaaccacagcaagaagcagaaaagccgtaatggtaaaagagaataagttctaattaaataagtacaagcatatattggaacaagctaggcgtaagggaggcttgttccaatatgcgtgtatcaaatgtaacagttagaaaacgacttatttttatacttatatcaggtatacttattttcacgattatcgatattcgtcttggatatgtgcaattttttcttgggaatatgttaacggatcgtgcgaaagattcatggagtcgtaatattacttttgaacccgaacgtgggaaaattttagaccgaaatggtgtggaacttgccacgaataaaagtgctccaactgtctttgttgtaccgaggcaaattgaaaaaccagcggagactgcagagaagttagctgcagtattaggtgtggaaaaagatgagatttataaaaggattacaaaaaaagaatcgattgtaaggttagataaaggcggaaggaaaatatcacatgacaaagcgaaagaagtacgaggattaagtctgaagggcgtgtatatcgcagaggattctatccggtactatccgtttggaaactttttatcacatgtattaggttttgcaggtagcgataaccaaggtcttatgggactagaaaaatattatgataaagagctaaatggggacaaaggtcatgtgcgtttttttgcagatgcgaaaggacaaaggatgcctaatgttggtgatgatttcaaaaagccagaagccggtttaaatttaggattaacaatcgatgcgcgtattacaaggattatggaaagagaaatgaatattgcggagtcaacttataatcctgacggtatgattgcgattgcaatgaaccctaaaaatggtgaagttttagggatgtctagtcgaccgagttttgacccagcggattttcaaagtgtctctccagaagtgtataacagaaatctacctgtatggagtacgtatgagcctggttcaacatttaagatcattacattagctgcagcattgaatgaaaatttagtagacttagagaaggatacgttttatgatgatggagcagctgaagtaggtggagctagattgaaatgctggaaagcaggaggtcatggcagtcaaacgtttttagaagtcgttcaaaactcatgtaacccgggatttattgaacttggtgatcgccttggtaaagaccgattatttaaatacattcgtaattttggttttgggcagaagactggaattgacttgcaaggtgaaggcagtgggattttatttaatttagataaagttggtccagtagagcaagcaacaacttcattcggccaaggagtttctgttacgccgattcaacaagtagcagctgtagcggcggctgtaaatggtggaacattgtatcagccgtatatagctaaggagtttattgatccgaaaaataatcaagttgttagtaaaaagacacctgttgagaaaagaaaagttatttccaaggaaacttcagaaaaagttcgttatgcattagagaatgttgtagcgaaaggttctggtaaaggtgcttatattgatggatatcgcgtaggtggaaaaacgggtactgctcaaaaggtgaaggatggtaaatatttagagaataattatatagtatcttttatcggatttgctccagcggatgatccagagattgttgtgtatgtagctgttgataatccaaaaggggttacacagtttggtggagtggtagcagctccgattgtcgggaatatccttcgagatgcgcttcctgttatgggagtgaaaccgagaaaagaacaagttgagaaagaatataaatggggcgatacaccaactgtggaagttccgaatttaattggaatgaaaaagaaagacttacaaacacaactcgtcgatttgaagcttgatataagtggagatggagagaaagtaattaaacaatcaccagaagcgggagctaaagtaaaagaaggctcaaaaattagaatttacttcgggaattaaaggtaacatagtacgttttatggtacaattggtggaagtgagttctttatagaacagttacttaatttgagacagtaagtgtctcattcataaataggtcagtagcacttacctccttatataggaggtaatgtgttgcttactgaaaaaagataaataaacaatgtagagagggtttagtgaaatgaagttgcatacacttgtatcatgtttgcatgattttccagttgttccaaaagaaaatccagaaatcacatctatagaagctgattcacgtaaagtgaaagagggaagcttatttgtatgtatgaaaggatatacggttgatagccatgattttgctaagcaagcagcggcacaaggagcggctgctattgttgcggaaagaccaattgatgttgacgttccagttgtacttgtgaaaaatacttttcgttcgttagcggttttagctgattatttttatggtcaaccgacacacaagttacatttaatcggaattacaggtacaaatggaaagacaacaacatcgcatattatggatgagattatgcgagcacatggtcataaaacagggctaattggaacgattaatatgaaaatcggtgatgaaacatttgaggtgaaaaatacaacaccagatgcactaacacttcaacagacgttttcaaaaatggttgaacaaggtgtggacagcacggtaatggaagtttcgtcacatgcgttagatcttggtcgtgtacacggatgtgattacgatgtagcggtgtttacgaatttaacacaagatcatttagactatcataaaacgatggaagaatataaacatgcaaaagggttactatttgcacagcttggcaatagttataatcataatcgtgaaaagtacgctgtgctgaatagcgatgataatgtaacagaagagtatatgagaagtactgcagcaacagttgtaacatatggtattgatacaacaagtgacattatggcaaaaaatatcgttatgacgagtggcgggactacatttacgcttgtcacaccatatgaaagtgtaaatgttacgatgaaattaataggtaaatttaatgtatataacgtacttgcagcaacagcagcaggacttgtttcgggtgtgaaattagaaacaatcattgctgttataaaagaactagctggggttccagggcgttttgaagttgttgatggaggacaaaattatacagttattgttgattacgcacatacgccggatagtttagaaaatgtattaaaaactgcaaaacaatttgcaaaaggtgatgtgtattgtatcgttggttgtggcggcgatagggaccgaacgaagagaccgataatggcaagtgttgcaacaaaatatgcaactcatgcaatttacacatcagataatccaagaagtgaagatccagcggctattttagatgatatggtacatggtgcaagtgggaaaaattatgaagtgattattgatagaaaagaagcgatacaccatgcaatcactaaagcgaaagcagatgatatcattattattgctggtaagggtcatgaaacgtatcaaattattggtaaagaagttcatcattttgatgatcgtgaagttgctaaagaagcaattaaagggcgtttaagcaacgaagagtaacaacgtgagaggaggactacatgtgcttgagcaaggtttattagtaacggctggggtagcattcttaatttctgttgccctttcgccattgtttattccatttttaagaaaattaaagttcggacagagtattcgtgatgagggaccaaagtcacatcaaaaaaaatcagggacaccgacaatgggtggtatcgtcatatacgtatctatgatggtaacttcacttattatggcgattaagtttaattatttaggtgcagaggtttcgttattactattagtgacgtttggttacggcttgattggatttttagatgactacataaaggtggttaagaagagaaatcttggtttaacatcaaagcaaaaattagtaggtcagcttgttattgctattgcattctttttaattggaaaagggcaagcgttccacacatacatcatgattccgggaacggatgttaagtttgaattaggttgggcgtatttcgtacttgtactatttatgcttattggtggatcaaatgcagttaacttaactgacggtttagatggtttattatcaggaacagctgctattgcatttggagcatttagtattattgctgtggcacaagagcaatttggagtggcgatattctgtatggcagttgtaggagctgtacttggatttttagtattcaatgcgaatccagcaaaagtgtttatgggagatacaggttcattagctttaggtggagccattgcagctgtagcgattttattaaaacaagaattgctacttgtaattatcggcggagtattcgtaatggaaactttatcggttatcattcaggtcatttcatttaaaacaacaggaaaacgtgtctttaaaatgagtccattacaccatcattatgaattatgtggttggtcagagtggcgtgttgttgtgacgttttggtctgcaggatttttattagctgtgttaggaatttatatcggggtgtggatgtaattgaaaactgtaactgaatttcaaaataagaatattcttgtattaggcattgcaaaaagtggttatgcagcagctacattgttacaaaagttaggggcaaatgttattgtaaatgacggaaagcctttagcagagaatgtacttgctgcagaattacaagcaaaaggaatggacgttgtatgcggtggtcatcctttagaattattagagagaaatatttctcttgtagtaaaaaatccaggaatcccgtattctaatccaatattagttgctgcgaaagaaaagcaaattccgattgttacggaagttgaattagcatatcgtatttcagaagcaccatttgttgggattacggggtctaacggtaaaacgacgacgacaatgctgacatttgaaatgctaaaagaaggacaaaagcatcctgtaattgcagggaacattggcactgtagcgtgtgaagtagcacaggatgcaaaagaaaatgaagttgtagttacagaactttcatcatttcaattgatgggagtagaattgttccaacctaaaattgctgcgtttttaaatttatttgaggcccacttagattatcatgggacgaagaaagaatatggtttagcgaaagcaaatatttttaaaaaccaaacagaaaatgattatagtgtaataaatgcagatgatgcagatgtgatggctttgtctgcgtattctaaaggtcaaaaaatcctgttttcgacaacgaaagaaattgaagatggcgcgtgtataaaagataacgctctttatttcaaaggtgaaaaagttgttgaagtaagcgatatcgttttacctggtcaacataatttagaaaatattttagctgcgatgagtattgcgaaattattaggtacttctaatgaagcaattacggtcgtgttaaaacgttttacgggtgtaaaacatcgtttagaatatgtaacaacgattaacaaccgtaagttttataatgattcaaaagcaacgaatatgttagcgactgagaaagcactatctgcgtttacacaaccgattgtgttactagcaggtgggcttgatcgcggaaatgaattcgatgatttaattccgtatttcaaaaatgtaaaagcgattgtaacatttggacaaacagctcctaaactagtaagagcggcagaaaaagcgggattagatataattgaaagtgtcgatactttagatgaagcagtggtgaaagcttatgctcattctaaagatggcgatgtcgttcttctttctccagcgtgtgcaagctgggatcaatttaaaacatttgaagaaagaggagacatttttatacaagctgtgcataaacttatataaagtaaatcaaaacatcagtaggctaacacctactgatgttttgttacatagggcaaaagtttctgcctaaagaggtggtgtttgtgggtaatgaagaaaacgcctgattttattctcatcatcgtaacactttcattgttgacaatcggaatgattatggtttatagtgcgagtgcagtttgggcctcttataaaatgggggactcattcttttttgcaaaaagacaattactgtttgcgggtcttggtgtagtagctatgttttttattatgaaaattgattattgggtgtggcgtacgtattcaaaagtgattttgctagtttgcttcattcttcttattctcgttcttattcctggagtaggtcttgttcgaggaggagcacgaagttggattggaatcggagcattttcgattcaaccgtcagaatttatgaagtttgcgatgattattttcttggcaaagtttttagcagaacggcaaaaattgattacatcttttaaacgtggtttattaccggcccttagttttgtgtttcttgcttttgggatgattatgttacagccagaccttgggacaggaacggtaatggttgggacatgtatcattatgatattcatttcgggagcgagggtctttcactttgcaatgtttggtttgattggtgtagcaggatttgtagggttaattgcatcagcaccgtatcgaatgaaacgcattacatcatatttagatccgtggtcagatccgctcgggagtggatttcaaattatccaatcattacttgcaattggacctggtggattatttgggcttggacttggacaaagtagacaaaaatttctttatttacctgaaccacaaactgactttatatttgcgatcttatccgaggaattaggttttattggtggttcatttgtgttattattatttagtctattattatggcgcgggattcgtatcgcattaggagcgccagatttatatggtacgtttttagcagtaggtattgtggcgatgattgcgattcaagtaatgattaatgttggtgttgtaacaggactgatgcctgttacgggtattaccttgccgtttttaagttatggtggatcaagtttgacattaatgttaatggcagtaggtgtattattaaatataagtcgccattctcgctactaaaccctgtttataagacagggtttttcgtatgtgtgtaaaaatgcaatatgtatatagaaataagtataatggaaataagaaaagagaagcggaggagttagtagtgcgtgtattagtgagtggtgggggtactggtggtcatatttatccagctcttgctttaattagagaaataaaaaagttaaatccagaagcgagatttttatatattggtacggaaaatggactagagagtacaatcgttccaaaagcaggtataccatttcaatctattgttataagtggatttaaacgaaaaatatcattagataatgtgaaaacagtaatgcgttttctaaaaggtgtacaggatagtaaacgatacattcgtcgttttaatccggatatcgtaattggaacgggtggatatgtatgtggaccagttgtatacgctgcagccaaattaggtattccaactattgtacatgaacaaaatagtgtaccaggtgtaacgaacaagtttttaagccgttatgttgataaagttgctgtttgttttgaagcagctatagagcattttccagagtcaaaagtggtaatgacaggtaatccacgagcatcagaggtaatggatcaaaatggaatgaaggggaaacgttcagttgggctttctcttcctaaaaagtctgtacttatatttggtggaagtcgtggggctagaccgattaacgatgccttcgttgaagcaattgaacagtttgggaacaaaagctacgaaatactatatgtaacgggtgaagtacattatgataaagtgatggaagccgtgaagcaaaaagggaacccaagcaatgttattattaagccgttcattcataatatgccagaggtactaactggtgtagaccttgttgtttcaagggctggggcaacaacacttgcagaattaacagcgttaggaaaaccaagtgtgttaataccgagtccgtatgtaacaaataatcatcaggaaaagaatgcacgttcagttgttgataaaggagcggcaaaaatgttacttgaaaaagatttaacagctgaaacgcttattcgtgatattgatgagattttattgaatgcacaaacattacaaaatatgaagctagcggctaagcaactaggtattccagatgcagcaaataagctgtatgaagtaatgaataagcttgtaaaaaaataaagtgaggctttaattagtggggagtgattctctctcgttgattattatctttcactaatcggatgtttactgacatcctgattccgcctaatttctttgttatcgccgaattttgatttaggagctgtactgcccgtaaatagagggataacgttaggtgaacgccctgcatattattgtcataaggagacttaatatgggggagattgtctatggaacaattagtaaatgagcttatagaagcagacgttggtcgtgttttagttaacgagccgttagcacgttatacaactatgaaaataggtggaccagcggatattttaattgtgccaaagcatgtagccggtattgaaaaaacattacagttagtaaagcaatacaaaacgaagtggactgtaattggtcgcggttcaaaccttcttgtatctgatcaaggcatagaaggtgttgttattcgtttaggagaaggattagatcacttagaggtcgaaaaacataaggtaagagttggtagtggatatcctcttattaaattgtcaactttacttagtcgtcaagggttagctggattggagtttgcgagcggtattccaggaagtgtcggtggtgcagtatatatgaatgcaggtgcacataaatcggatatatcgagtgtattatcgaaggctctcattctgtttgaagacggtacaattgcctggttaacgaataaagaactggagttttcttatcggtcatctgtattgcaaacgaaacgtcctggtattgttttagaggcggagtttcaattacaggcgggaaaacgtgaagaaattgtacgtagcatgcaaaataataaagactaccgccgtgaaacgcaaccatggaatcatccgtgtgcaggaagtatatttcggaatccaatcccacattttgcaggagatttagtagaaaaagcagggcttcgtggttataggattggtggagctcaaatttctgaaatgcatggcaattttattgttaataccgggggagcttcagcgcaagatgtaatgtctttaattgaattaataaaacatacaattaaggataaatttgatgtagatatgcacacagaagtagaaatcattggaagataacggttattcgttccgctcattatcatttatgttataataagaagataagaacggcatgaggaacatgccgttctttatgttacatagggggatcgtacatgaataatagtaaagtgattaaactacaagatcgtgtaccaaaattgaaaaatcaaaagaaaaaaaacaaaaaaaatgttaatcatcgattgattttatacatatcaattttatttttattagtgctctttttaatttattttcggtctccgcttagtaatataaaaaagattagtgtgtttggaaatcactatatgacggatgagcaagtaatgaaggattcaggcgtgacatatgatacaagttatttccgagtgacagcacataaagctgaagaaaacttaacgaagcgaaaagaaattaaagcagtaaatgtaaaaaaacgttttccaaacaagattgatattcatatcgaagaatatttaacgattggttatataaataaagagggaaaactacaaccgttattagaaaatggaaaaacgcttgatgtactacctaatggaaaacttcctgttgcagcaccgattttcgaaccttttaaagaagagaaaatgaaggagttaatcgctgaactagaaaaattaacaccagctattttaaaatctatttcggagattcgctattcaccaacaaatgcgaatgaagatcatcttactttatatatgaatgaaggttatgaagtgagcactacgattcaaaatttcgcaaaacgtatggaagcctatccacttattttaaaaacaattgagccaggtaagaaggtattaattgacttagaagtaggtgcatatacgaaagaattaggtgcggaagacaaaaaagaatagaatggtagttttcgttgcttatagcagaaaaaacgaaacgaatgttctattatatgtatacgaatttagaagaatggttcatttgatgaaaaatatgtaaaaattcttagattcatactagtattggtacaagtttcacttttctatgagtacatcttagtgtagacttatacttggcggtaaactttacactggaaatagaattatttcaagataagcagttattcatagtttactgcgatattcttaattgaatgctaaataaaaataagaaaaatatagggttaaaaaagggaaacgtataaagacgttgaatatttttcttataaatagtaaagttgcgattgttgttccatatattgagttgtatggtataaataaagaaggaggtgccaaagaatgaacagcaatgaaatatatgttagtcttgacatcggtacatccaatgttaaagtcatcattggtgaaatggttaatgacagcttaaacattattggtgttggaaatgtaaaatcaaatggtttaaagaagggatcgatagttgatatagacgagactgttcgatcaattaaaaaagcaattgaacaagctgagcgcatggtgggaatccacattgagcaagttgtagtaggtgtcaatgcaaaccaggtacagctacttccttgtcacggagtagtcgctgtttcaaatgaagatcgtgaaatcgggaatgaagatgtcttacgcgttctagatgcagcacaagttgtgtcaattgctccagagcgtgagtttattgatgtggtacctcgacagttcatcgtagacggtcttgacgagattaacgatccacgcgggatgatcggtgtaagattagaaatggaaggtacacttattacaggctcgagaactttactacataacctacttcgttgtgtagaaaaagcaggtcttgaaattgttgatatttgtcttcaacctttagcggctgcaacagttgctatatcttcagatgaaaaaaatagaggagtagcccttgttgatatggggggaggatctacaactttatctatttttaaagatggagagttacaagcgacgagcgtattaccattaggtggagaccatataacgaaagatattgcgattgggttgaaaacttcaacagaaaatgcagatcaaattaagttgaaatatggacatgctttttatgatacagcatctgaagaagagatgtttacggttcctattatgggaagtgatcaaacagaacaatattctcagttggaattatcggatataatagaggctcgtgtagaggaaattttaatgtttgttcaagatgaagtgcgtaagttaggagtaaagcaagtggcttctggttatgtactaactggcggaattgcttctatgccaggtgttcttgatcttgcatatgatattttacatgaaaatgttcgtgtagcaactcctgattatattggtgtgcgtgagccccaatatacaagtggagttggattaattaaacattcttatcaaaaagctaaattacgtgggaaaaatgtgcaggaaaagcaagagcattttgaaccagtaccagcaccagcaccaacgccggtacaacagcaacccgcgaaacaaaaaactcgtaatcaaaacaataataatcaaaatgatgaccgcatgatgtcaaaagtaaaacgtgtattccgttatttatgggattaaaattggacacgaaaaatgaggttctagggggatttcgacatgttagagtttgatactactcaagatcaattagcgaatataaaagttatcggtgtcggcggtggcggaaacaatgctgtaaaccgtatgattgaacacggtgtacaaggtgtagactttatcgctgtgaacactgatgcacaagcattaaatctatcaaaagctgaaacaaaaatgcaaattggtggaaaattaacgcgtggacttggtgcaggcgcaaaccctgaagtagggaaaaaagctgcagaagaaagtaaagaacagatccaagaagcacttcgtggtgcggatatggtcttcgtaactgccggtatgggcggtggaactggaactggtgcagctccagttgttgctcaagttgcaaaagaattaggtgctttaacagttggtgttgtaacacgtccatttacttttgaaggacgtaagcgtgcgacgcaagcagcatctggtattgcagcatttaaagaaaatgtagatactcttattgtaattccaaacgatcgcttattagagattgttgataaaaatacgccaatgttagaagcattccgtgaagctgataacgtattacgtcaaggtgttcaaggtatttcggatttaattgcaacgccaggtttaattaacttagactttgcagacgtaaagacaattatgtctaatagaggttctgctttaatgggtattggttctggtaacggggaaaatcgtgctgcagaagctgcgaaaaaagcgatttctagtccattactagaaacatctattgatggagctcaaggtgttatcatgaacattacgggtggcgctaacttaagcttatatgaagtacaagaagcggcagatatcgtagcttcagcttcagatccagaagtaaatatgatcttcggttctgttattaacgaaggattaaaagatgatatcgttgtaactgtaattgcaactggttttgatgatagcattgcaactcaaccaccaaaaccaattattcgcccgaatgcgaaccacacgcaacaacagcaacaaccagtagctcaaccttcaaaacaacgtgaagtaaaacgtgaaatgaagcgtgaagagccagttgtacatgagcgtcattcagattcagatgatatcgatattccagcatttttacgtaaccgtcgtagacgataaaaaaaggagctttcatgctccttttttgttttttaaatggaaaagacctgctaagcaggtcttttttttatttggtatattttgttggtgaaaataagagtatatcattctatgaatttgtacttttattttttaccgacagattatgtctagaaatcacaaaataacaaaaaaacacctccgcaaattgacacactttcctattggatatgcattatactagtctcaacttgaaaaaagaggtgaattgtttggttgtttacgccgacgttgtttggttgttaaacgcctgcattgattttcttttgcttttattaacagctaccgtgttaaaaaagaaaatcaaaaaatggaggcttgtgttaggggcatttataggttcaactattgttatttttgcctttactccttttgcttctatgatgacacatccaattatgaaactactgtactcgttacttattgtgtatacagcatttgggtttacaacatttagaaattatgcacaaactgtttttactttttactttgtaacctttatggttggcggaggattaattggaactcatttctttttgcaaacgaatgaaatggtaaatggattggttcaatctcagtcaatttcttacggtgatccaattagttggttatttgttatttttggttttccagtaatttattatttttctaaaaagcgtattgaaagcgtagaggtcacgaaaatacactatgatcaaattgtgaaagtaaaaattcaattagcagaagaagaactagaactggcaggtcttattgacagtgggaaccaactttatgacccattaacaaaaacacccgttatgattatgcatgtttcatcattagaacattgcttaccatcttggttaacagaacaaatttattccaaaacagaaattcctcaaataccagaaaatgattctggttgggcgacaaaattacgcttaattcctttccgtgcagtaggggtagagagtcaatttttgtgggcaattaagcctgacagtgtgcaagttgaccatgaaggtagttctattgttgtaaacaaagtattaattggattaaatacacaacagctttctactaatggggagtatcaatgtattgtgcatccaaaaatgttgatttcacaaaaaatggtaattgcttaataatgagaggcgggataatatgatgaaattaaaattttatttagtatacctttggtataaagtattgctgaaattaggaattaagaccgatgaaatttattatattggtggaagtgaagcgttgccaccaccgttaacaaaagaagaagaggaagttcttttgaataaattgccaaaaggagatcaggcagcaaggtcattacttattgaacgtaacttaaggctcgttgtatatatagcaagaaagtttgaaaatacagggataaatattgaagatttgattagtataggaacaatcggccttattaaagcggtaaatacatttaatccagaaaagaaaataaaattagcaacatatgcatcgcgttgtatagaaaatgaaattttaatgcatttacgtcgaaataacaaaaatcgttcggaagtttcttttgatgaaccactaaacattgattgggatgggaatgaactgttattgtctgacgtgttaggtacagatgatgatattattacaaaagatttagaagctactgtagatcgtcaccttttaatgaaagcattacaccaattaaatgatcgtgaaaaacaaattatggaacttcggtttgggcttgctggaggagaggaaaagacgcaaaaagatgtggctgatatgcttgggatttcacagtcatacatttcgcgtttagaaaaaagaattataaaaagattacgaaaagaatttaataaaatggtgtaaagaataagaccagccgttatgtaggctggtcttattctatttagttgtattaggaaagataatttaaataacaaatcgtgaaaaaaccacatgcataaaatccccttcaaaggaaatactttacactgtacagcaactcccgataggagggaacactttgacgagaaacaaagtagaaatttgcggtgttgatacagctaaacttccagtattaaaaaatgaagagatgcgtaaattatttcgtgaaatgcaaagtggagagataagcgcaagagaaaaattagtgaatggaaacttacgtcttgtactgagcgtcatccaaagatttaataacagaggagaatatgttgacgatttatttcaagttggttgcatcggacttatgaaatcaattgataattttgatttaggccaaaatgtaaaattttcaacgtatgctgtgccgatgattattggggaaatacgcagatatttgcgtgataataatccgattcgcgtatcgcgctcattgcgagatattgcgtataaagctttgcaagtaagagaaaagttgattgcagaaaattcaaaagaaccaacagcaatggatattgcaaaagtgctagaagtaactcatgaagagatagtatttgctttagatgcaattcaagatccagtttcattatttgaaccgatttataatgatgggggagatcctatctttgttatggatcagttaagtgatgaaaaacaaaaggacgagcagtgggttgaagaattagcattgaaagaaggaatgaagcgtttaaatgatagagagaaaatgattattagaaaacgtttcttccaaggaaagacacagatggaagttgcagaagaaattgggatttcccaagcgcaagtatcacgtttagagaagtcagccattaaacaaatgaataaaacgattcaaggataaggtctcaccaattatggtgagacctttttatatgtaatatggtttgtgctcatagtaggggatttgtgttcatataatgaaactagcatggtgtttcgtgtaggtggcttcctgtaaatatgagaaacagtttccaatttgtcatataagggagaggataaaaatggtgatacgaatttcagagttacagatgaaggatgttataaatatttcagatggaaaaaggattgggaatattggagatattgaaattgatatgaacacagggaaaatttgttctgttattatttcaaaacagacacgtatgctaggtatttttggaaaagatgttgagattgtaattccttggaaggaaattgtgaaaattggggaagatgtcatacttgtaagagtaaatcctgttaattctgtaacagaatcaatacaaacaccgacaatttcataaagaatattacaaattcctcttttttttctgttaggattatgaaaaaataaaagtatggtaaaatagacaggaagtaccatgcttttttctgttattttaattaaaaggagccgctttattatgagagaaccatttaaatatgtggacggtatactgtatttacaagcgtggaaagaacttggaaacattactgctggatttacgacaaaagatggtgggataagtacgggctcctttcatgcgatgaatttaggattacatgtgaatgatatcgtggagaacgttcatgaaaacagacgcattttagcaaataagttacaaaaaccattagaaaattggatttgctctgaacaagttcatgctcatcatgttgaaaaagtagggcaacaggaaaagggaagtggtgtctattcatatgaggacggcatttcaaaaacagatggcatttatacgagtaatgaagatgttctgttaacgtcttgttacgcggattgtgttccgctctatttttatgcaccatcacatggtatgataggacttgcgcatgctggatggaaaggcactgtacaagagattgcaaaggaaatgattcaaaagtggaatgcagaaggtatttcaagtgatgaaattcatgttgcaattgggccgtcgatcggatcttgttgttatgttgtggatgatcgtgtattaacagcagcacaggaagtagttaggggtgctgttcctcatcaaaaaatttctgacgggcagtacgcaattaatttaaaagaaattaatcgtatattatgtgtacaagcaggcataaaagaagagcatattgtaatgtcatctctttgtacaagctgtgaagagcaactatttttctctcatcgtcgtgatcaaggtaagacaggaagaatgttgagtttcataggttttaaggaggaagaaagcaagtgacagtacaagaaaatttagaaattgtaaacgaagctattaaagaatcttgcgctcgagctggacgttcgttgcaagatattaaacttgttgcagttacaaaaactgtagggattgaaaaaacaaatgaagtaattgaagctggagttatcgatttaggtgaaaatagaaatgaaggtttcttacagaaatacgagcatttcggttcaaaagttaattggcactttattggctcattacaaacgagaaaagtaaaagaaatcattaatgaaattgattatttacattcgttagatcgtctttcactggcgaaagaaattcagaaacgtgctgataagaaagtgaaatgctttattcaagtgaaaacctcatctgaagaatcgaagcaaggattggcaatagaagaggttgtttcttttattcaaagtttgcaagaattcgataaaattgaagtggttggactaatgacgatggctccatttacagaagaagaggaagaaatcagacgctgttttaaggaattacgtatgctgcaaacagaggtgcaggagctagagttattacatgcgccatgtaaagaattatcaatgggaatgtccaacgattacaagattgcaattgaagaaggggctacatatattcgtttgggaacgattttagtaggaaaagcgtaaaaggaaggagaatcttattatgagttggtcaaaagtaaaatacttcttttttgatacaccggaagaaaaagaagcagctcaatatggttatgaaaaggagcaaacagacatgaaaaagcagcaagatccaccagaacaacaagacgttacgtttccgaaagcgcaaccgaagcaaaatgttgtgagtattgaaacagcaaaacaatcttcaaaagttgttttattagaaccacgcacatattcggaagcacaagggattgcggaccacttaaaaggtagacgagctgttgtaattaatttgcagagaatgtctactgatcaagcggtacgtatcgttgactttttaagtggtactgtatacgctataggcggggacattcaaaaaatagggccgaaaacatttatgtgtacacctgaaaatgtagatattgttggtgcgatttcagagttattcggtgaagaagaagaaacaaatataaagaggtggtaatacgccatgacaacagtttttatagtgttaagttatgctatcgagatttactcgtgggcacttattatttacattctcctatcatggtttcctggtgcaaaggaatcatcttttggagagttcctggcacgtatttgtgaaccgtatttagaaccattccgccgctttattccgccgcttggaatgattgatatttctccaatcgttgcaatctttgcgttgaaacttgctaaaactggtttgttcagtttattaagctatttcttatagtaagaaggtaaatacatgagcatctacgaacattttaggcctgatgaggaggtctttgtggataaagtgctagagtggaagcgagcggcggagtaccatcaagtgaagttaacggattttcttgatcctaggcaacaacaaattgtttctatggtaataggacaaggtgatgttgctgtgcaatttggtggtgcaacgcctaatgcagagcgtaaaagagcacttatttatccagactatctagaattaaatgaagaagaatttcaagtagaagtattagaaattgactatccttccaagttttatacgctagaacataggcaaatattaggtacatttatgtctcttggtttaacaagagaaaaatgtggtgatattttgctgcaagaaaatcgtgcccaaattgtagttgcgaaagaaattgtatcgtatattgagatgaacttacaatcaatagggaaagtaaaagtctctttagcgtcagtgcaaggagaacaaattctacagatacatgaaacgtggggagagaaatctggaacggtttcttcacttcgtttagatgttatgttagctgaaatgttacatttatctagacagaaagtacaacctttcataaaaaatggtttagtaaaagtcaattggaaaacagtggagcaaacttcttatgaatgttatccaggagatgttttttctgttagaggatatggccgaagtaaattattttctgtagaaggtagaacaaaacgcgacaaatggagaattttgtatggtatactaaaatgattggttttttagaaggaaatcctcctattttgtcgaagaaaagatataattgaaagaggaaatttagataactacttggaggtggcgttgtgccgttaacaccattagatattcataacaaagaatttggtcgcggattccgtggctatgatgaagatcaagtaaatgagtttcttgatcaaattatcaaagattatgaattggtcattcgtgagaaaaaagctttagaagaaaaagttgcgcagttagaagggaagttagatcatttctctaatattgaagatacgttaaacaaatctatcgttgttgcacaagaagcagcggaagaagtaaaacgtaatgcgcaaaaagaagcgaaattaattgtgcgtgaagctgaaaagaatgctgatcgtattattaacgaagcattagtaaaatcaagaaaagttgcttttgatattgaagagctaaagaaacaagcgaaagtattccgaactcgtttccgtatgttattagaaacacagcttgagatgttaaacaacgatgattgggataaactaattgaattagaagacgaagtagatgaactgttgaaaaaagaagaaacagtgtaagcttgacgtttttctcattattacatataattttaaacaacatatttattaagaaaaacgaagatagggataagtaccttttcaaaccttatatagcgaactgaggatggtgtaagctcaggataaggagatagtgggaatatcaccctggagttccgcgctgaacaaatagagtaagcgtaggcgtgtattcgcgttaagaatataaagaggattctatacatatgtatagaatctactagggtggtaccgcgggagactttctcgtcccttttggggatgagaaggtctcttttttattccgttttttaagtatttcttttatacatgtaaggaggaattgagcatggagtacaaaaatacattactgatgccaaaaacagagttcccaatgcgtgggaatttaccaaaacgtgagcctgcaatgcaagaaaaatgggctgaaatgaatatttacgaaaaagtacaagaacatacaaaaggtcgtcctttatttgtattgcatgatggacctccatatgcgaatggtgacattcatatgggacatgcattaaataaagtattaaaagactttattgttcgttataaatcaatgactggttttagtgcgccatatgttccgggatgggatacgcacggtttaccaattgaacaagctttaacaaataaaggtgtaaaacgtaaagaaatgacagttgctgagttccgtaagttatgtgcagagtatgcatatgaacaagtagaacgtcaacgtgagcaatttaagcgtctaggtgtacgtgcagattgggataatccatatattactttagagccagcttatgaagcacaacaaattaaagtgtttggtgacatggcgaaaaaaggttatatctataaaggtcaaaaaccagtttactggtctccaacgagtgaatctgctttagcagaagctgaaattgaatatcaagataaaaaatcagcatctatttacgtagcattccctgtaaaagatggaaagaacgtattagaaggtgatgaaaagtacatcatttggacaacaacaccttggacattacctgcaaacttaggtatttctgttcatccagagcttgaatatagcattgtaaaagtaaatgatgagaaatatatcattgcttctgagctgtttgagacagttgcaaaaacgttagagtgggaaaatgctgaagttgtgaaaacagtaaaaggtagcgaacttgagtatacagttgcaaaacatccattctacgatcgtgattcattagttatgctaggagatcacgtaacaacagatgcaggtacaggttgtgttcatacagcaccaggacacggggaagatgacttcgttgttggtaaaaagtatggattagaagtactttgcccagtcgatgataaaggtgtattaacaaatgaggcacctggatttgaaggcttattctatgataaagctaacaaaccaattacagaaaaattagaagaagtaggcgcgttactgaaactaacattcattacacattcatacccacatgattggagaacgaaaaaaccaattattttccgtgcgacagcacagtggtttgcatctattgaagcattccgtaaagaattaatagaagctgtagcagaaacaaaatgggtaccagcatggggagaaactcgtcttcataatatggttcgtgaccgtggtgactggtgtatttctcgtcagcgtgcatggggtgtgccaattccggtattctatgctgagaatggtgatccaattattacggatgaaacaattaaccatgtagcagatttattccgtgaacacggttctaacgtatggttcgagcgtgaagcgaaagatctattaccagaaggatttacacatccaggtagtccaaatggtgaattccgtaaagaaacagacatcatggatgtatggttcgattcaggttcttctcaccaagcggtattagaagagcgcgaagatttacagcgtccagctgatttatatttagaaggatctgaccagtatcgtggttggtttaactcttcattatcaacagcagttgctgtaacaggtaaagctccatataaaggcgtactaagccacggtttcgtactagatggtgaaggacgtaaaatgagtaagtcgattggaaacatcgtcgtaccgaagaaaatcatggatcaattaggcggagacattttacgcttatgggtatcttctgttgactatcaatctgacgtacgtatttcagatgatattttaaaacaagtagcagaagtgtatcgtaaaatccgtaacacattccgtttcttattaggaaacttagacgactttaagccaagtgaaaatgcagtagctgtagctgaacttcgtgaagtagatcgttacatgttagtaaaattaaatgacttaattacaaaagttaaagaagcatatgagacatacgatttcgctgctgtgtatcatgcaattcataacttctgtacaattgatttaagttcattctacttagactttgcaaaagacatcttatacattgaaggtgcaaaccacgaagatcgtcgtgcaattcaaactgtattatatgatgttcttgttgcgttaacgaaacttgtaacaccaatcttaccgcacacagctgatgaagtatggccatatattccaggcgtaacagaagaaagtgtacaattaactgatatgccagaagctgtacaattagatgacgcggaagcgttaaaaacaaaatgggatgcatttatgacattacgtgatgacgtgttaaaagcactagaagtagctcgtaatgaaaaagtaatcggtaagtcattaaatgcaagcattacgctatatccaactgcagaaatgaaagctatgttagagtctattagcgaagacttaaagcaattattcatcgtttctgagtataaacttggtggtatgatggatgaagcgccagcagatgcaccgaagtatgaacatacagcggttgttgttgttcaagcaactggtgaaacatgtgaacgttgttgggtagtttcagaaacaattggtaaagatgctgaacatgaaacattatgtgagcgttgtgcaacagttgttaaagaaaactatgtaaaataataaaaaactgactgctattgatgcggtcagtttttttgttgatggtatatcaagatcactttcagactctttcctgtgaaggaaaaatgtgtgtgaggtaagcaaataaatttcggacacactaactgtacattacagctaggaggaatgtacacgtgaatgaaatttacatggaaataaaagaagaattgcaattgatgagaaaagagttgcaagagagactagctaaagaagtaatgcacaaatatgatgtcgagttcagccaagagcttggatatgaaattaaggaagagataaagaaaaaattgctattacatgatataaaagaggatttaaaggatgtagaacgcgcattatttaaaatggaaatagacatgtatggtatttgtgaagagacggggagattaatttccacaaagcaaatgaagacaatgccgactgcccgtacgattcatgaattcttctacgaaaaggtaaatgtatgaatacgcacaacgatattatattacctttttttaatttattttattcttctataaaggttcattgtgaaaaggtagcagctatgctaaaattttgaggtacactgtctttgtgggggaaatgaaaatgatatattatgtaatagcgttattcgtcattgctatcgatcaaatatcgaagtggttaattgtaaagaacatggaattgggtacgagtattccgattatcgacaatgtattatacataacatcacatcgaaatagaggcgctgcttggggtattttagaaaataaaatgtggttcttctacattattacagttgtttttgtagtgtttattgtattttatatgaaaaagtatgcgaaaacagacaagcttctaggtatttcgttaagcctaattttgggcggggcaattggtaactttattgatcgtgtatttagacaagaagtagtggatttcattcacgtgtatattttctcgtacaactatccagtattcaatatagctgattcagcattatgtattggtgttgtattaattattattcaaacattattagaaggcaagaaagcgaaggagtaattgaatgagtgaagtagtacaagtaacagttgcagcagagcaaaaaaacgagcgaattgataaattcgttgcagggataaataacgaatggtcacgtacgcaagtgcagcaatggattaaagatgacgttgtgacagtaaacggaaaagcggtaaaagggaattataaagtaaaagaagaagatgaaattacagtaacaattcctgaaccagaagagttagatattcaaccagaggatttaaatttagaaatttattatgaagatgcagatgtgcttgttgtaaataagccacgtggtatggttgtacatccagcaccagggcatacaagtggtacacttgtaaacggccttatgcaccattgtacagacttatcaggcattaacggtgtaatgcgtccaggtatcgtgcatcgtattgataaagatacatctggactattaatggttgctaaaaatgatatggcacatgaatcgcttgtaaatcagcttgtagcaaaaacagtaacgagacgttacaaagcgattgtacacggtgtgattccgcatgataagggaacgattgatgctccgattgctcgtgataagaaagagcgtcaaagtatgacagttgatgaaaatggtaagaacgctgttacgcacttccaagtgttagaacgctttaaagactttacgcttgtagaatgtcgcttagaaacgggacgtacgcaccaaattcgtgttcatatgaaatatattggctatccacttgcaggagatccgaagtatggtccgaagaaaacgttagatatgaatggacaagcacttcatgcgggtattttaggctttgatcatcctcgtactggtgaatatattcagtttgaggcaccgattccagaagtgtttgaagacgtattaaatattttacgaaaatagtattgacaaatcataagaaaactgagatactgacaacagttaaataatgatcctttaacacagccccgtgaggttgagaaggtaacggtttgaaatacttagggtatgttgtacccttttttcaaaagtcctctcgcacacgctgagaggactttttttataccattactctcacgcaagaaaaaagcttggaggtgtagagcatgcaagagaaagctgtcgttttagatgaccaaatgattcgccgcgctttaacacgaattagtcatgaaatcgtggaacgaaataaaggtgtcgataattgtgttcttgtcggaattaaaactcgtggaatttttattgcacaacgtttggcagaacgaattggtcaaattgaaggaaaagaaatggaagttggagagttagacattacgttatatcgtgatgatttaacactacaatcgaaaaataaagaaccacttgtaaaaggttctgatatccctgtagatattacgaagaagaaagttatccttgtggatgacgtattatatacaggaagaacagttcgagcagcaatggatgctcttatggatttaggtagaccatctcaaatccaattggcggttcttgttgatagaggtcatcgcgaattaccaattcgcgctgattatgtagggaagaacattccaacatcaagtgaagagcgtatcgaagttgatttgcaagagacagatcaacaagatcgagtaagcatatacgataagtaaagcccttttaaatgtagtcctgtgaggctgccaaagggtcttggctttcatatgtcaaatttggcatacgaaagtgtaggactctttgtgcacaggcacaaagagtttttttattgcaaagatttaaactgaaggaggatgtaacaatggaacaaaagccagtgttagacgttaatgaagtaccgaaaccgggaaaatggttatttttaagtatacaacatttgttcgcgatgtttggatcaacagtgcttgttccgtttttaacaggattgaatccatcagtagcattaatatcaagtggattaggaacgttagcgttccttcttataacgaaaggtcaagtacctgcctatctaggatcatcattcgcctttatcgcaccgattataacagcgaaaacggcaggtggaccgggagcagcaatgcttggtggtttgctagcaggacttgtgtacatcttaatctcactcggaattaagaaatcaggatcagagtggattatgaaattactaccaccaatcgtagttggtccagtagtaatggtaatcggtctagctttagcacatacagcagttaacatggcgatgaacggtgcggatggcaaatatagctttacacacttttcagtagcattagtaacattagcaattacaattatatgctcgatatttggaaaaggatttttcagtataataccagtgttacttggcattatcggcggatatatcttcgcttacttccaagggctagtagacttaaagccggtagctgaggcaaaatggtttgttgtaccagatttcacagtaccatttgtaacatatacaccagagttttcatggaagattgtactcttgatggtaccagttgcactagtaacaatatcagaacatatcggacatcaaattgttcttggaaatgttattaaaagagatttaattgaaaaaccaggtttacaccgttcaatcttcggtgacggagtagcaacattaattgcgtcactaatcggtgggccaccgaatacaacgtatggtgaaaacatcggtgtgctagcaattacgagagcatacagtgtatacttattcatcggttcagcagtattcgcaatcatgttcgggtttatcggtaagatttctgcactgattcattcgatcccaacaccagttatgggtggtgtatcaatcttactattcggtgtaatcgcatcaagcggattacgcatgatggtagatgataaaacagatttaagtgacaaacgaaacttaatgattgcatcagtaatattagtaatcggtattggtggagcggtacttcacgtaggagaatcattccaagtagaaggaatggcactagcagcaattgtaggtgtactgttaaatctactactaccggaaacgaaacaaataaaacaatctaagcagattgcttcataataataaccttttaattcagtcctgtgagaccggaaagggtggcttctttcttgcaccctagtctcacatgactagggtatttttatgcaaaggttgttataaaaattcaaaagtggtaacataaaaatcagaaagatgagggatgacgatgagccatttgttaacgatgagtgaattatcggaagtagaaatttcagaaatcctaaaagatgcagaagattttgcgaatggaaaagagagcaaaacgacagagcaaacttttgttgcgaacttgttctttgagaatagtacgagaacgagatttagctttgaagttgctgagaagagattaggacttgatgttttaaacttttcagctgatgcatctagcgtacaaaaaggagaaactttatacgatacgataagaacactagaatcaatcggaacaaaagcagtggtcatccgccacgagcaagatcgctacttcgatgaactaaaagatcaggtgaatattccaatcttaaacgctggagatggatgcggaaaccacccaacgcagtgcctactcgatcttcttacaattaaacaagagtttggaagatttgaaggtttgaagattgcaatagtaggagatgttcgtcatagccgagtagcacgttctaatgcagaagcattaacgaagcttggtgcaacaatttactttgcaagtccagaagagtggaaagatgaagacaacacatttggaacatacaaaccattagatgaacttgttccagaagttgatgtaatgatgttactccgtgtacaacatgagcgtcatgatcattatgaaacagacattatgaaagaatatcatgagaaacacggattaacagtagaaagagaaaagcgtatgaaagaaggaagcattattatgcatccagctcctgtaaaccgtgatgttgaaattgcaagtgaacttgttgagtgtgagcgttcacgcatatttaaacaaatggaaaatggagtttacgtaagaatggctgtactaaaacgcgccttaccaaatgtattaggaggaatgaaacatgaattatttgtttaaaaatggtcgttatatgaatgaagaaggaaaaatcgtagcaacggatcttctcgtacaagacggtaaaatcgctaaggtagcagaaaatattacggcagataatgctgaagtaatcgatgtgaacggaaagttaatcgcacctggattagtagatgtacacgtacatcttcgtgaaccaggtggtgaacataaagaaacaattgaaacaggtacactagcagcggcaaaaggtggattcactacaatttgcgcaatgccaaatacacgcccggtaccagaatgcagagaacatatggaagacttgcaaaaacgtattgaagaaaaagctcatgttaacgtactaccatacggagcaattacagtacgtcaagctggttctgaaatgacagatttcgaaacattaaaagaacttggagcatttgctttcacagatgacggcgtaggcgtacaagatgcgagcatgatgttagcggctatgaaacgtgcagcaaaattagatatggcagtagttgcgcactgtgaagagaatacgcttattaataaaggttgtgtacatgaagggaagttttctgagaaacacgcattaaacggtatcccatcagtatgtgaatctgtacatattgcaagggatatactgcttgctgaagcagcagattgccactatcacgtatgtcatgtaagtacgaaaggttcggtacgtgtaatccgtgatgcgaaacgcgctggaattaaagtaacagcagaagtaacaccgcatcacctagtgttatgtgaagatgatatcccatcagctgatcctaactttaaaatgaacccaccgcttcgtggaaaagaagaccatgcagcattaattgaaggtttattagatggaacgatcgatatgattgcaactgaccatgcaccgcatacagcggaagagaaagcacaaggaattgaaagagcaccgtttggaattactggttttgaaacagcattcccgcttctatacacaaaccttgtgaaaaagggagttattacgctagaacagttaattcaattcttaacagaaaagccagctgatacattcggcttagaagcaggtcgcctaaaagaaggtagagcagctgatattacaatcattgatttagaacaagaagaagagattgacccaacaacattcttatcaaaaggaaaaaatacaccattcgcaggttggaaatgccaaggatggccggtaatgacaatcgttggtggtaagatcgcatggcaaaaggagagtgcattagtatgaaaagacaacttatcttagaagatggaacagtattaattggaacaggtttcggaggcgaaatcgaaaagtcaggtgaggttgtatttacaacaggaatgactggatatcaagaaacattatctgatccatcatattgcggtcaaatcgtaacattcacgtacccattaatcggaaactacggcattaaccgtgacgattttgaatccattcacccatctgtaaatggtttaatcgtaaacgaaatttgtgatcatccatcaaacttccgtaatgaaatttcgttaaatgattacttgaaagaaagaaatatcccaggattagcagggattgatacgagaaaattaacgagaaaaattcgtcaatacggtacattacgcggacgcctttgtaatatggatgcagatgtagagtacattgtaagtcaattaaaagcgacagtatttacagatcatgtaaaacgcgtatcaacgaaagatccatacccaagcccaggtcgtggtcaccgagttgtactagtagacttcggtatgaaacatggtattttacgagaattaaataagcgtgactgtgatgtaattgtagttccttacaacacaacagcagaagaaattttacgccttagcccagatggaattatgttaagtaatggacctggagatccgaaagatgtatcagaagcaattgaaatgttaaaagacattatcggtaaagttcctttattcggaatttgcctaggacatcaattgttcgctctagcatcaggtgcaaatacaagtaagttgaaatttggtcaccgtggtttaaaccatccagtaaaaaatcttgcaactggaaaagtagcaattacatctcaaaatcacggatacgcagtagaagaagaatcagttgaaaatacagatcttgaaattacacatgttgctttaaacgatggaacggtagaaggtcttcgtcataagaagttcccagcatttacagtacaataccatccagaagcttcagcgggaccagaagatgcaaatgatttattcgaagatttcttaacaatgattgaaaacttcaagaaagaaggggaagagttatgccaaaacgcctagacattaacacaattttagtaatcggatcaggaccaattgtaattgggcaagcagcggagtttgactactctggtacacaagcttgtcaatctcttaaagaggaaggttacaaagtaatccttgttaactctaacccagcaacaattatgacggatactgcaacagcagataaagtatacatcgagccattaacattagaattcgtaagccgtattattcgtaaagaacgtcctgatgcaatcctaccaacattaggtggtcaaacaggtttaaacatggctgttgaacttgcaaaatcaggcgtacttgacgagtgcggagttgaaattttaggaacaaaattatcagcaatcgagcaagcggaagatcgtgatttattccgtacattaatgcaagatttaaatgaaccaacaccaccaagtgaaattattcataaccttgatgaagcatatggatttgtaaatgaaattggttatccagtaatcgttcgaccagcgttcacattaggaggaacgggcgggggaatttgccataacgaagaagagctaattgaaatcgtaacaagtggtttaaaacatagtccagtaacacaatgtttattagagaaaagtattgctggctgtaaggaaattgaatatgaagtaatgcgtgattcaaatgataacgcgattgtagtatgtaacatggaaaacatcgatccagttggtgttcacacaggtgattcgattgtagtagcaccgagccaaacgctaagcgaccgtgaatatcaaatgttacgtaacacttcattacgaattattcgtgcactaggaattgaaggtggatgtaacgttcagcttgcgcttgatccatatagcttccaatactatgtaatcgaagtaaatccacgtgtaagtcgttcatctgcactagcatctaaagcaactggatatccaattgcgaaattagcagcaaaaattgcagtcggcttaacgttagatgaaattgtaaacccagtaacacaaaaaacttacgcttgcttcgagccagcgttagactatgttgtttcaaaaattccacgttggccgtttgataagtttgaatcagcgaacagaacgcttggaacacaaatgaaagcaactggtgaagttatgtcaatcggacgtaacttagaagaatcattactaaaagcagttcgttctttagagcttggcatttatcacttagaattagaccacttaaaagaacttgataaagaaacgatgaaaaaacgtatcattaaagcggatgatgaacgactgtttattgtagcagaagcaattcgccaaggtgtaacgaaagaagaaatcaatgaatggtgtgaaatggacttcttcttcttacaaaaagttgaaaacatcgtaaatatggaatgtgaagtaaaagcgaatgtaggaaatatagaagtactacaaactgcaaaagaaatgggcttcagcgatcactacattgcagcagcttggaacaaaacggagcgtgaaatttacgatatgcgtaaagaaaataatatgatgccagtattcaaaatggtagatacttgtgcggcagagtttgaatctgcaacgccatattactacagcacatatgcggacgaaaatgaatcgattgtaacagatcgtaagagtgtagtagttctaggatctggtccgatccgaattggtcaaggtgttgagtttgattacgcaacagttcactcagtatgggcaattaaagaagctggatatgaagcaattatcattaacaacaacccagaaacagtttcaacagacttcagtatttctgacaaattatactttgaaccattaacgattgaagatgtaatgcacattatcgatttagaaaaaccagaaggtgttatcgttcagttcggtggacaaacggcaattaacttagcagcgaaactagaagaacacggtgtgaaaattttaggaacatcacttgaagacttagaccgtgcagaagatcgtgataaattcgaagctgctttaacaaaacttggcatcccgcaaccagttggtaaaacagcaacgactgtagaacaagcggtagcaatcgcagaagaaattggttacccagtattagtaagaccatcttacgtactaggtggacgtgcaatggaaatcgtatatcgtcaagaagaactgctgcactacatgaaaaatgcagttaaagttcatgcagatcacccagtattaatcgaccgttacatggttggtaaagaaattgaagtagatgcaatttcggatggtgagaatgtattcattccaggtattatggaacatattgaacgcgctggagttcactctggtgactcaattggagtatatccaccacaaagtttatctgaaaaactaaaagaacaaatcattgaacatacaattgcacttggaaaaggattaaacattgttggattactaaatatccagtttgtagtattcaaagatcaagtgtacgtaattgaagtaaatccacgtgcaagccgtacagtaccgttcttaagtaaaattacaggcgtaccgatggcgaatgttgcaacgaaagttattttagggcaagacctagtagagcaaggatacggaactggctatcacccagaagagaaagaagtatatgtaaaagctccggtattctcattcgcgaaactacgctcagttgatacaacattaggacctgaaatgaaatcaacaggggaagtaatgggtaaagacttaacgcttgaaaaagcattatataaaggattagttgcttctggaattaacatcccaacgcacggctcagtaatcattactgtagctgataaagataaagaagaagcgatggaaattgcaaaacgtttccacgaaatcggctataacttattagcaacagctggaacagcacaatcattagaagagcaaaatatcccagtacaagttgtaaacaaaattgattctgaagactacaacttactagatattatccgtcaaggaaaagcacagtttgtaattaacacattaacaaaaggtaaacaaccagcgcgtgatggtttccgcattcgccgtgaatcagtagaaaatggtgtggcttgcttaacatcacttgatacaacgagagcaatcttacgagtattagaatctatgacattctcagctcattcaatgaaagaaattacgcaaacaaagcgtcacgaggtggtacatgcatgatgcaaaagcaaaatatgatcgtcgttaatcaaaaagaaatcgcaaaaaatatttacgaattagtgcttcaaggaacgttagtacagcaaatgaacgaaccagggcagtttgtacacattaaggtagcagagggcattgcgccccttctgcgccgcccaattagtatttgtaatgtagatcaagagaagaacgaatttacaatgctatatcgtgccgaaggacaagggacaaaaacattagcaactagaaaacaaggtgaaatggtagatgtactaggaccattaggacacggttttcctgtagaagaagcagaagctggtcaaacagctttactagtaggcgggggaattggtgtaccaccactttatgaattatcacagcgcctcgttgcaaaaggtgtacgtgttattcacatcttaggctttcaaacgaaagatgtagttttctatgaagaaaaatttgcagaacttggtgatacgtacgttgcaacagtagacggtacacacggtacaaaaggatttgtcacagatgtaattgataattacggaattgactttgatattctttattcatgtggtccgttagcgatgcttcgtgcattagaaggacgttacaaagagaaaaaagcctatatttcattagaagaacgtatgggctgtggtattggagcttgtttcgcatgtgtatgccacttacaagaagatccaagtggacattcttacaagaaggtgtgtagcgacggaccagtatttccaatcggggaggttgtactatgaacagattgcaagttgaattaccaggattatcattaaaaaatccaattataccggcatctggatgctttgggtttggtcgtgaatatgcacagttttacgatttaagtgtactaggatcaatcatgattaaagcgacgacagaacaaccacgttatggaaatccgacgcctcgtgttgctgaaacaccaggcggcatgctaaatgcaatcggacttcaaaacccgggattagacaaagtaatgaattcggaattaccatggttagaacaatttgaccttccaattattgcgaacgttgcaggctcacaagctgaggattacgtagcggttgcgaaggaaatttctaaagcgcctaatgtccatgcactagaattaaatatttcttgtccgaacgtaaaaacaggtggtatcgcctttggtacaaatcctgaaattgctgctgatttaacgaagcgagtaaaagaggtttctgaagtacctgtatacgtgaagttgtcaccgaacgtggcaaacattgtggaaattgcaaaagcgattgaaaatgcaggtgcagatggtttaacgatgattaatacattgcttggtatgcgtctagatttaaaaacagctaaaccaattttagcaaactgtacaggtggattatcaggtcctgcgattaagccagtagcaattcgtatggtacatgaagtaagccaagcggtaaacattccgattatcggaatgggtggtattgagacagcggaagatgtaattgaattcttctatgctggcgcaagcgcagttgcagtaggtacagcgaactttattgatccgttcgtatgtccgacaattattgaagagttaccagcattactagatgaattaggatttgatcacatttcggaatgtcaaggaaggagctggaagcaaacatgtcacagtcgttaatcgttgcattagattttccagggaaacaagatgtagaacaattcttgcgccactttgaaggggaagagttatttgtcaaagttggtatggagttattttacaaagaaggccctgcgattattacgtacttaaaagaaaaagggcataagatctttctagatttaaaacttcatgatattccaaatacggtaaaaagcgctatgcgtagcctagctagtctagatgttgatatggtaaatgttcatgctgctgggggaagcagtatgatgaaagctgcgattgagggattagaggaaggtaagcaagaaggaaaagagagaccgatttgtattgcagttacacaactaacaagcacttcggaagctatgatgaaaaaagagatcggcattgagaaaacgttagaagaagcggttgctcattatgcaaaactaacgaaagaaagtggacttgatggcgttgtttgttcaacacttgaagttccaaaattacgtgaagtatgcggaaatgaatttgtaacggtaacaccggggattcgtcttgcaagcgatgatgtaaatgaccaagtgcgcgtagcgacaccgaaacgtgcgagggaacttggctcaagctacattgtagttggacgtagtattacaaaagcagaaaatccgcttgaagcgtataaaacagtaaaacaacagtgggaaggtgtaacagtatgaaaaaagaaatcgcatcgcatttattagaaattggagcagtatttttacaaccgaatgatccattcacttggtcttcaggtatgaaatcgccaatttattgtgataaccgtttaactttatcttatccaaaagtacgtcaagcgattgcagctggattagaagagttaattaaagagcacttcccaactgtagaaattattgcaggaactgcaactgctggtattgcgcacgctgcatgggtaagcgatcgtatggatttaccaatgtgctacgtacgtagtaaagcaaaaggtcacggtaaagggaaccaaatcgaaggaaaagctgaaaaaggtcaaaaagtcgtagtagtagaagacttaatttcaactggcggtagtgcaattacatgtgtagaagcacttcgcgaagctggatgtgaagtattagggatcgtatcaatcttcacatacgagcttgaagcaggaaaagaaaaactagaagcagctaacgtagcatcatattctttaagtgattacagtacattaactgaagttgcagcagaaaaaggtatgattggacaagctgaaacgaagaaattacaagagtggcgtaaaaatccagctaacgaagcttggatcacagcgtaacacgaaaaaagacgaccgcgggggaacgcggtcgttttttatatcattgttaaaacttcaagtaaagttccatcaatatcaaagaaaatcatattacaatctccttaactacttagcgctttctgcaagctcatatcctcttaaaaacaataaagtcatataagaaacaataaatgagaagatgctgtacatgccaacccaaaagaaaaattttggagtaaaggcgataacacctattattaaaaaactagcaaacgttacaatcggcattacgtaatacgttttcgtcttgcgcgttccaataacagaaacgataaagataagtaatggacaaattaataagacgaaaatcaattcattcataggtatgtccccttttctaattgcagtaatctgtttctcgtaaacgttttgaaataattactctcctaatataatttcgctaagtaataacgaatccctcttgaaaactgataattcatgatgaattttacaagcaaaaaacgtaagcaagagaacacttgcttacgttataggataaacatcgcaacgatcgtggtgacaattaaaccgataacaaccggtaaaaagtttcggcgtgcaagttcaaatggatcgactttacaaatcgcagcagcaggaataagtgcccaaggaattaacgtcccgcccccggtccatatagctgcaatttgcccgagtgctgttaatgtagctgttccatggccaagtgctgttccaaaaagattggcaatggaaccagcaagtgatatacctgaaaaacctgatccatctaagccggtaatgacaccaacgatggttaatgtccctgccgatacatattgatttaaaggaacagtttgagataaagcgatgcctaagtcgttaatgattccgtgtgaacctttcggtaaatagtccccgataatttttacaaatccactatctcctaaataaaagagtgcagcgataggaataactggtccgaaaattttaaagccaaattggagcccttctatgaaataatcggtcgttttattcagtccatttcctttgtaggcgatgagggaaatgatgataatcataataacagtcgttccgccgataagtgcagttgcgtcgcttccttgtaatttaaattgaatcatgcaaaggatatcaatgatatatatgatagggatacaaatagcgagccatttttttatgcgagaagataatgaagtgagcgttttagaagactcagttgatggaatagcttcttgtatagataagcctgtatgaaactcttttcgtaagaagaaaaaagcgacagaagttgtcacaatgcccataacgataacgagtggaacacttgcagatacgatgctggaaacagggagaccagccgcgtctgcagttaatttcggtgcaccttgaataacgaagtctccagataaggcgatgccgtgtccaaataagttcatagcaattgcaaccccaattggaggaaggccgacacgtacagcaaccggtaataaaatagctcccattaaggcgacagctggagaaggccaaaagaagaaagaaatggtcatcattaaaaggccgataatccagtaggcgagtgtaggtgtacgaatcatttttgtaaatggtgaaatcatcgtatcatttatgccagtatgaacgagtaaattgctcattgatacgataatggagatgattaatatagttggtaatagctcagtaatggcgtaaatgaaactttgaaaaattccgctaatggcaagagggatagaacttgttgcagttaatgctaataaaaagataaaaacgatacaaatgatagtcgtatcttttcggagaataaaaaaggtaataatagtgagtaaacaaataatgtagagagcgtgtaatagcgttaattcaactcccataacattcacatcctttaggcattcgtgtagtgtattgtatgaaagcagtgaaagtatgtgagtataggaaaaagaaaaaatgaaatttcatgtactgtaatggtaagaaagataaatggatgttacaatacaaataatcctaaaaatggaatttaaggagaacttatgcgcaaaaaaattgggttttggggatttaccatatcttgtagtctattaatcactttaaatttgtttacaaacaatgaatggatcagtatcatacctgttttcggctttgtttttatactgttatataactgggatgatatgaaacaatatagtaagaaaagtatcggaattatgataggtgtcattgttgtttgctcatttttcgtagggtttattttaatagaagggcagaaacaaatagagaaaacgtctatttttcaagaatggatgtcgtctgcaaaaggtctttatattgtaattatagctgttatttttctaagaattattataagcatagcaagttacgtattaaaggagaagtagaatgggggagtacgaatgagagagaaaataggatattatggtgtgctcgtttgtttactattatcagttatttcaggacaattccttaacagtgactgggtaccagctatattatgtataggagtattgatttttgcatctatgtatcgttggaatgaatggaaagcatatagccgaaaaaagaaatttgttttcagtatcgagtttgtcattattattagcacaattccgttttttctattgaaaggaaatgagataatagatggaattgtaatgtttcaagggtggttatttattgcgaaaatgctgtatttaatatgtatattaatgtcggtagtggtaatcgttaaaaaagtaaacgaaaagttattcgttaatgaataaaagaaaatgccaccttattcggtggcatttttttctatgatttcaacaaggaataacaattagttcccgatttgattttgtaataacttcatagccttcttttgtaatgacgatatcgtcttcaattctacaaccgccccagttcggtatgtaaatgcccggctcaactgtaacaaccataccttcttgtaaagttaccttactttcttgggataggcgaagcggttcatgtatttctaacccaagaccgtgcccagtagagtggccaaagtattgaccgtatccatgttctgtaatgtaatccctcgttatatcatcgatacttttcgcagtttctccaggcttaatcgcttcagtcccacgttttaacgcttctcgtacaacattgtatatttttttgaattcttccgatggttcccctattgctacagtacgtgttatatcggaacaatatccgtcgtaaagtgcaccgaagtctaatgtaacgatatcccctcgttcgattattttatttgatgcaactccatggggaagtgaagaacgaacgcctgaggctacaatgatttggaatgaagaagatgtagcccctttttttcgcatgaaaaattctaattcatctcgtacagcattttcacttattcctggttttagaaacgtaagaatgtggtgaaatgcttcgtccgcgatattagctgcaattttcattgtttctatttcaggcgtgtctttaatgatacgaatattttcgataatttcgcacacttgaatcatttccgcctgtacgtatttttgcaagtttttatattgttgcaatgtcatgttgttttcttcaattccaagtttttgaatgtttaatttcgatacttgatgtgcaatttctttttctaaatttcctttatgcataataatttcagcatcttttatttgtgatttcgcttgatctacatagcggaaatcagtgataaaaacagcttgatcggcagagattaagacgacgccagcactacctgtaaagcctgttgcatattggcggttttcttttttggtaataagtaacccgtcaatttcatagttttgtaattgattttggattttattaatttttaaagtcatgttaattcctcctattcacagtattgaataaagcaaatagcgtgccaaaatgtatatttgaagaaaggatagtagggacaacatatattttaggggagataaaaaaatagcccgtaatttgtgggaggcggtttgttcataaaatctagattgcttcaatgaatagcagggggatggggaaaaataatgattggagttacacttgtactttatttacatgctgtaaaaaattttatacaaatgtgaaatgatactgtcaatttttttgacaatattgaatgaatatagcaacgaaattgaaaacatataaaaaatgcgctgcatacaagcaacgcattttttatttacgcttttaatttcattacaatatcagcatctggtgttacatatacggtttgctgattgtcgtacgtaacaaaaccaagttttgcaccactcggttttttgacatggcgtattttggtgaaatcaacaggtacagagctagactctttcgctttgctgtaataggcagcaattttggcagcttctagtaaagtttcttcagcaggctctaaagaacgaatgacaacgtgagagccaggtatgtctttcgtatgtaaccaaatttcatcacggcgggcaaacttcgttgttaaataatcattttgtttattgtttttaccaacgaaaatctctgtgccatcacttgctacatatttatctaatactggtttagtaggctttttctttgcgtttttcgttttgcgattgcgcacataaccttcttcagctaattcctcacgaatttcttcaatatcttttgaagaagcagcttccatttgttgaagtaagctatcaaaataaagaatttcttcatttgttttttcgatttgttcttctacaacaacaactgaattttttgctttttgatacttttggaaatagcgttgtgcattttcagatggtgtttttaaaggatctaatgtaatttttacagttccaccattctcatcgtaataattaacgacctcaatatctttatcgcccttttttaaagcgtacatattggctgtaagtagctctccaaatagttgatatttatctgcttttccagcatcttgcagtgttttttcgagtttaatgagttttttctcgtttttatttttttcgttttgcataaagcgttctaaatcatgagcttgttgttttacacgatcacgttctgctttgccaaagaagaaacgatctaacaattcgctcactgatgagaatgttttttcttctccttgcaagtgtgtaagagggaaaagataaaagaattcttttccatttgcagtaatcattgtaggtgtatatgcatgagatagtaatggtgtttgtatagagaaaaatgcttctgataatgctttctcgtttgccataccggctttctttactacttcttttgcaaataatggggatattcccatgaaagcaccgacgagttgtttatccatatttccagatagaaagtctagcggtctaataaaatcatctgcggtttcaatttgcagaggattgattttatgttgggctggtggcgcgacgtactcagcaccagcatatacagttcggtgacggtttacggctaatgaaacgtgttttaagctatctaaaatcacgtttgttttcgtatctaataagataatgttactatgtcgtcccattatttcaattactaatgtttttaatgattcgtctccgatttcattacgactgcgaactgtaatttgaataatgcgttctaagtcgatttgttcaattttttcaataaatccaccttctaaatgtttgcgaagaagcatacagaacatcggcggtattgctggcgaatcgtagttttgattcgttaagtgcatacgcgcatatgtaggatgagatgaaagaattagtttttggttctttccattcgctcgaatatgtaataaaatctcgtattttgaaggttgatatattttggaaattcttcctgtgtaaagagaattttcaatttcatgtgtaatcgctcttgtaaataatccatcgaatgccataaatgaacactcctttctaactaaatgttaattatagcatttttttggacgaggctgaataagctttcaatagagtatgtctggaatcaggaggtcgatagcaggatgaactggtatggaatgcgagcacatgaagtggaagaaagaacgaatacgaatgtaaaggttggacttacagagaaagaagcagaagggcgagtaaagaaatttggtactaatgaattagaagaagcaaaaaggccttctgcactaatggtatttttagcacagtttaaagatttcatggtactcgttttgtttggagcaacaattgtttctgcgtttttaggtgaatacattgattctattgctattgttgccattgttattatcaatggtattctcggcttttttcaagaaagaaaagctgaaaaatcattggaagctttaaaggaactagccgctccacaagttactgtaatgcggaatggaaagtgggtaaaagcaccatctaaagcacttgttttaggagatattattaagttttccagtggtgatcgtattggggctgatgtgcgtcttgttgaggcatcaagtttatatattgaagagtctgctttgacaggggagtccgtacctgtacaaaagaaggtagaagcattgcaagggcaagatgttgcaattggggatcaaaaaaatatggcttttatggggacaatgattacgcgaggatctggtacaggagttgttgtagcaactggtatgaatacagcgatggggcaaattgcaaatatgttgcaaaatgcagagcaaatggaaacgccactgcaaagaaggttagaacagctcggaaaaatattaattattgtagctcttattttgacagcgctcgttgtattggctggtgtgtatcaagggaatgaagtatatcatatgtttttagctggcgtatcgctagctgttgcggctattccagaaggattgccagcaattgttacagtagctttatcacttggtgtacagcgtatgataaaaaagagagcaattgtaaggaagttaccggccgtagaaacgttaggctgcgcttctgttatatgctctgataaaacgggaacaatgacgcaaaacaaaatgatggtaacacatatgtggtcaggcggagaattgtggaaagtgacagggcaaggatatgaacctaatggctcttttatgaaaggtgaaaaagaagtgaatccagctaagacaaaatcactttatcagctacttacatttggttcactatgtaacaatgcaaatattattcaaaagaaaaaggcgtacgtattagatggagatccgacagagggagcgcttgtagctgcagcaatgaaagctgggataacacgtgaggcattaaaagggaaatttaaaattattcgtgaattcccctttgattcaactcgaaaaatgatgagtgttattgtacgagatcgagaggggaaaaagtttattgttacgaaaggagcaccggatgttcttttgcaactgagtcaaacaatcttatggggggataagcagcagccgttaagtgagctatatagaaaagaagtacaggcggctattcatagcttaggtagtcaagcgcttcgaacaattgcagttgcgtttaaacctttaaaagtcacggattctattgaacatgaaagagacgttgaaaaagattttatgttggttggaatacaaggtatgattgacccgccaaggccagaagtggcgcaggcggtaaaagagtgtaaagaagctggtattcgaacagtaatgattacaggtgatcataaagtgacagcaatggcgattgctgaacaattaggagttttaccaccagatggacgcgttgttgaaggagtagaactcgcgaatatggatgtggaggaattagaaaatgttgtagaagatacgtatgtattcgctcgtgtatcacctgagcataaattgaaaattgttaaggcactgcaaaatcaaggacatatagtagcgatgacaggtgatggagtgaacgatgctccagcgataaaaacagcggatattgggatagcgatgggaattacagggacagatgttgcgaaagaagcctcttcacttgttttactagacgataattttgctacaattaaatcagcaattaaagaaggaagaaatatatatgagaacatacgtaagttcattcgctacttattggcgtcaaatgttggagaaattttagttatgttatttgcgatgttacttgcattaccactgccgatggttcctattcaaattttatgggtgaacttagttactgatggtttaccagcgatggcattaggtttggataaggctgaaggagatgtgatgaagagaacaccgcgtcacccgaaagaaggggtattcgctagagggcttgcgtggaaaataataagtcgagggtttttaattggagcagtgacgttagtggcgtttattattgcgtataaccaacatccaaatgaactgaaatatgcacaaactgtagcgttcgcgacgttggtacttgctcagcttattcatgtatttgattgtcgtagtgagcattctgtctttcaccgtaatccatttgggaacgtgtatttagtaggggcggttattatttcgttactactcatgctagtggttatatattatccaccgttacaaccaatctttagcacaatgccgatacaagcaagagattggttattaattggaggtttgtcatcaattccgactttcttactagtaggttctttattaacagggaaaaaggctaagaagaaaaagccgatattatataagaagggattaaacttgaaatagtcaatgttatgaaaatgtgatataatttacagaaggtagtagagccttgtctctattacctttttcattgagttattttatggcttggatgtgataaaaatgatttctagtatgacagggtttggaagatcgaaagtagaaagtgatacttttcaaattacagtagaaatgaaatcggtgaaccaccgttttttagagatgagtattcgacttcctaagcaaatgatggtatttgaggacaaaattcgtaaaataattgcacagcaagttcgacgtggacgcattgaagtgtctattagtatagcgggtgaaggacttgttgaaagaaaattaagtgtgaattggtcacttcttgagcagtaccaatcgatgatggaagatataaaagggaaatttcaattacaagattctattacacttcagcaattaatggcaatgccagaagtaacagcaattgaagaaatagaaaatgtaaatgagcattttgagaacagtttatatgaggctgttcgtcaagctgctcatatgttgaaaacgatgagagatggcgaaggagaacgattacataaagatatagcgtatcgtttacaagagattagcaattgtgtaaatgcaattattccacatgcaccaattgttacacaaaaatatcgtgaacgattagaaaatcgcttaaaagaattacataatcaagatctagatgaacaaagattgctaacagaagtcgcaatctttgcagagcgttgtgatattcatgaagagttagttcgtttgcaaagtcatttagagcaatttcgtgaaacattgcagattgaagagcctgttggaaggaaaatggatttcatcgtgcaagagatgcatagagaaattaatacgattggttctaaggcaaatgacttaacaatttcaaaatatgttgtagaaatgaaaaataaccttgaaaaaattcgtgaacaagtacaaaatattgagtagctttcaaaaaatatataaagttatacgtggtggagaaatcggatagacttactaggaggcgcaaactatggccatgcggtttttaaatattggatacggaaatattgtatctgctcatcgaattattgctattgtaagtccggagtcagctcctattaaacgaacagtacaggaagcacgcgaacataatgctttgcttgatgctacgtatgggagaaaaacaagggcggttattgttatggatgatgggcatgttgtattaagtccaattcaaccagagacgattgcacatcgtttgaataataaagaagatttaagtgaggaagggtaggttttacatatttatgagaagtagaagaggattgctcatcgttctttcagggccttctggggttggaaaagggacggttcgtaaagagctgtttagccatgaggatacacgttttcagtactctatttcagtaacgacacgtaagccgcgtgaaggtgaagtagatggtgtggattatttctttaaagaaagagaagaattcgaggaaatgattcgtaatgaaaaattacttgagtgggctgagttcgtaggtaattattacggaacaccgattgactatgttgaaaaaacattacaagaaggaaaagatgtattcttagaaattgaagtgcaaggagcaattcaagttaagaaagctttcccagaaggtgtatttattttcttagcacctccaagtttatctgaactaaagagccgtattgtcggacgtggtacagagactgaagatgttattgaaaatcgtttaactgtagcgaaagaagaaatcgagatgatggacgcttacgactatgtagtagaaaacgatcaagttgaattagcttgtgatagaattaaagcaattgtggttggcgaacattgccgccgcgaaagggtagcaaaatattataaagaaatgacggagggtctataattatgttaaatccatcaattgactcattactacaaaaaatcgattctaagtacacattagtaacagtagctgcaaaacgcgcgcgtgaaatgcaacttgctaataactgtgttgtagaaaaacctgtttctcataaatgtgtaggtaaagcattagaagaaatcgatgcagaagcattaagctacgtaccaagtgaagataaagtagctgaataagcctttgccttcgacaaaataaaacatagactttataattttctatgtaacggtaacaacctatttacaagtaggttgttatttttttacgaaaggaatgaaatattggtactgacgagctgagaattctatttcagtattataagtttgaaaaagaaagaggacgagtcatatgctaaaagggaaaaagatacttctatgtgtaacaggaggcattgcggtttttaaagcagctgcgttaacgagtaaattgacacaatctggcgcgattgtaaaagtaatgatgagtgagtcggcaatgaagtttgttacgcctcttacattccaagcgctttctcgccatgatgtatatacggatacatttgatgagaaagactcagctgttattgctcatattgatttagcagattgggcggatgttgtacttgtcgcacctgctactgccaattgtattggaaagttagctggtggtattgcagatgatatgattacaactactttgttagctactacagctccggtatggattgcgcctgctatgaatgtgcatatgtatgaaaataaaatagttcaaaaaaatatgatgacattgaaaacgctaggatatacatttattgagcctggggaaggctttttagcatgtggatatgtggcgaagggacgactagaagaacctgaagcaattattgcacggttagaggaagctttctcagaacacaaaccattgcagggaaaaagaatattaataactgctggcccaacacgtgaaaaggttgatccagttcgttttatgacaaatttttcttctggaaaaatggggtatgcgattgcggaagtggcagcgaatttaggcgctgatgttatactcgtttcaggaccgacagcattaaatacaccgttacatgtaacgacagtgcaagtggaatctgcacaagatatgttagaagcggttcttcaacattatcaaaacgtagacgttgtcattaaaacagcagcagttgcagattatcgtccgaaatatgttcatgagaataaaatgaaaaagcaaaatggtgatgctgtcattgaacttgaaagaacggtggatattttaaaaacgttaggtcagaaaaaggataaacagttacttatcggttttgctgctgaaacgacaaatgtagaggaatatgcaacgaaaaaactacgtgagaaaaatgcagatatgattgtcgcgaatgatgtaaaagcgcaaggagctggatttggcacggatacgaatattgtaacaatgtatagaaaagatggaaaagttattgagttgccaattttaatgaaaaaagaggtagctcgtgaaatattgaagcaaattgaaatgatgttagaagatgatcgtttatgaaatttgcaagtgtaattgttgatgtacctgcccgtcagacagatcgaccatttgattacattatccctaaaaaatgggaagatattgtacagacaggaatgcgtgtagtagttccgtttggcccaagaaaattgcaaggttttattattgggattaaagattcggtggatgtagaaagtaagaagttaaagacaatccatgaaatattagatgtaacaccggttttaaatgatgaattattaaagcttggatattggcttacaagtgaaacgttatgctacatgatttcagcttttcaagtgatgcttccaactgcgataaaagcaacgtataaaaaacgtctacaactttgtaaacaggaagaaatagcacctgaaatactatatttatttcaggataaagaagcaattgattttgaagtaatcgagcaacagccacatttataccgaactattcaacaagaaattaaaaatggtacggttgaagtcgtttatcaagtgaaagataaagtacaaaagaagaagcaaagagtggttcagccggagttgccagaagataaattggaattagcggcatttgaactgaaaagtaaaaaacaacaagatgtactttattattttgtggaaaattataaaagtgcaccgttgaaagtaattacagaagagttacaaataacagatgctccaataaaagcacttgttaaaaagggattcatttcagaaaagtatgtggaagtataccgaaatccgtatgacgatgatgattttgaacaaacaaaaccatttccacttacggaggaacaaaaacaagttattacaccgattttatcatcaattacaaatgaaacttataatccatttttactatatggtgttacaggaagtggaaagacagaagtatatttacaatctatagcagcagtgctcaagaaaggaaaagaagctatcgttcttgttcctgaaattgcactaacgccccaaatggtggatcgttttaaaggtaggtttggctcacaagttgcagttcttcatagtgcgttgtctgttggagaaaagtatgacgagtggcgtaagattttaagaaaagaagtgaaagttgtagttggtgcgcgttcagctgtttttgcgccttttgagaatttagggattattattattgatgaagagcatgaatcaagttacaaacaagaagataatccgaggtatcatgcaagagatgtagctgtctggagaggacaatatcataaatgtcctatcgttcttggtagtgcgacaccaacacttgaatcgtttgcaagggcgaaaaaaggtgtttatgaactattaacaatggaaaaacgtatgaatgaacaagctttaccaacggtagagattgttgacatgcgagaagaacttcgtgacgggaatcgatcaatgttttctaaggcgctgcatgaaaaaatagcagatcgattagaaaagaaagaacaaatggtactctttttaaatagaagaggtcattctacatttgttatgtgccgtgattgtgggtatgttgttcaatgtccgcattgtgatatttcattgacatatcataaaatgaatcatcgtttaaaatgtcattattgtagttacgaagagaatatgccaactgagtgtccagcttgtcaaagtacatacattcgtttctttggtacaggtacacaaaaggtagaagaagaaattacaaaactatttccagaggcacgagtcattcgaatggatgtagatacgacaagtcgaaaaggaatgcatgaaaaattattaaaggcgttcggggaagaaaaagcagatatattactcggaacacaaatgattgctaaaggattagattttccgaaagtaacgctcgttggggtgttaactgcagatacgatgcttcacttacctgattttcgggcgagtgaaaagacatatcagctattgacgcaagtaagtggacgagcgggtagacatgaattgccaggggaagttgtgattcaaacgtatacgccagaacattacagtatagagttagcgaagaaccaacaatatgatgtgttttttgaccaagaaatgcaaatgagacgaacaagacaatatcccccatattactatgttgtactcgtaactgtatctcatcctgaattattaaaagcggtacaagtgacggaaaaaattgcctcgtatttacgaacgcattgctcacagcaaacaatggtgctaggaccagttgcttcagcgattccaaggataaaagatagatatcgttatcaatgcatgataaaatacaaacgggaaccaaacttaaagaacgtgctcaaaatggtaaatgaacattatcaagcagaaatgcaaaaagagctacaaatctcaattgattttaatccaacaatgttaatgtagcggagggaaatatggcagttttagaaataataaagcatccaaatgaagtgttagaaacaccatgcgaaagagtaattaactttgataaaaagttagtgaaattgttgaaagatatgcatgaaacaatgttaattgcggacggagtcggtttagctgcgcctcaagtaggtgtaagcttgcaagtagcggttgttgatgtcgatgatgatactgggaaaatcgagttaatcaatccatcaatattagaaaaacgtggtgaacaagtaggtcccgaaggctgtttaagcttcccgggactttatggtgaagtagaacgtgccgattatattaaagtaagagcgcaaaatcgccgtgggaaagtattcttattagaagcggaaggatttttagcgcgtgcaattcaacatgaaattgatcatttacacggtgttttatttacatcgaaagtgacaagatattatgaagaaaacgaactagaataggtgttaaaaggagcggtttttaaatgataaaagtagtgtttatgggaacaccggacttttcagtgccggtgcttcgtcgtcttattgaagatggctatgaggtagtaggtgttgtgacgcaacctgatcgtccagtaggtagaaaaaaagtattaacacctacacctgttaaagttgaagcggaaaaacatggtatccctgtgttacagccgttaaaaattcgtgaaaaagatgaatatgaaaaagtattggcattagagccagatttaattgtaacagctgcatttgggcagattgtaccaaatgaaattttagaagcaccgaagtatggatgtattaatgttcacgcttctttacttcctgaacttcgtggtggtgcaccaattcattatgcaattatggaaggtaaagaaaaaacaggtattacaattatgtatatggtagaaaaattggatgctggtgatatcttaacgcaagtggaagttgaaattgaagagcgtgaaacgacaggctcattatttgataaattaagtgaagcaggagcacaccttctatctaaaacagtacctttattaatccaaggtaagttagaaccgattaaacaaaacgaagaagaagtaacgtttgcgtacaatataaaacgtgagcaagagaaaattgattggacaaaaacaggtgaagaagtatacaatcacattcgcggattgaatccatggccagttgcttatacaactttagcgggacaagttgttaaagtatggtggggagaaaaagtgcctataactgaaccggctgaagcaggtacgattgttgcaatcgaagaagatggttttgttgtagcaacgagtaatgaaacaggtgttaaaattactgaattgcaaccttctggtaaaaagcgtatgagttgttcacaatttttacgtggaacaaaacctgaaattggaacgaagttaggagaaaatgcatgagacaaaatgttcgtgaattagctcttgatggtttaattcaagtggaaaaaagtggtgcatatagcaacttacttttaaataatctaattgaaaaaagtgcaattgatagaaaagatattggtttattaactgaaattgtatatggaacgattcaacgtcgtgacacattagattattatttacagccttttttaaaaaagaaggttgaggcgtgggtaagagtattgcttcgcttatctttatatcaaatgatttatttagaccgagtgccagaaagagcggctattcatgaagcggttgagattgcaaagcgtcgcgggcataaaggaattgctggtatggtgaacggtgtattacgttcgattcagagagaaggtgtaccttctgtagatgaaatcaaggatccagtagaacgtcttgcaattacaacaagtcatccagtttggcttgtccaagagtggacttcagaatacggtttagaaactgcagaaaaaatgtgcgaagtaaacatgttaccccctgtaccaacagcgcgtgtgaatgttgataaggtaacggtagaagaagcgattgagttgttggcaagtgaaggtatagaagcaaaaagtggtgacttatcagatgatgcaattcagattgaaagaggaaatgtagcgcatacagaagcgtttaaaaaaggatttctttctattcaagatgaaagttctatgcttgtagcacgcgctttagaaccgaatacgggagatgcagttcttgatagttgtgctgctccaggcggaaaaacaacgcatatcgcggaacgattaaagggaactggtaaggtcatgtcccttgatttacatgcacacaaagtacgtttaattaaacagcaagcagagcgacttggtctagaaaatgtcgaaactaaagcgctagatgctagaaaagtgcaagagcactttgcaaatgaaacgtttgataaaatattggtagatgcaccgtgttctggatttggtgtaattagacgtaagcctgatattaagttaggaaaagataaaggcgatagtgaaagattatcgacgattcaaattgcaatactagaaaaaatagcaccattattaaaacaaggcggtcgtcttgtttatagtacgtgcacaattgagaaaatagaaaatgaacaagtaatagagaaatttttacaagaacatcctgaatttgaatgggatactacgcttaaagagcgtatgccagaaaaattaactccgtatattgatgaaggtcaagtacaaattttaccgcattattttgcgacggatggcttttatattgcttgtttaaggaagaaggtgtagcatcatggaaacgactgtaagaaaacaaaagaaaaatttagaaacgaagaaaccatcaatttactctttacaacttcatgaaatgcaagattggttaaaggaacaaggagaaccgaagttccgtgctggacaaatttttgattggttatataaaaaacgtgtaaaaaattatgaggatatgtcaaacctttctaaaggattgcgtgataaattgtcgaattcctttgatattactactttaaacacgttagtaaaacaaacgtcttcggatggaacaattaaattcttattccaattatatgacggatattctattgaaacggtattaatgcgacacgaatatggaaattccatttgtgtaacaacgcaagttggttgtcgtattgggtgtacgttctgtgcttcgacacttggtggattaaagcgaaacctagaagctggagaaatcgtagcgcaagtagtagaagttcagcgtgcgcttgatgaaacggaagaacgtgtaagttctcttgttgttatggggattggagaaccatttgataactatgataatttaatgggattcttacgcatcattaaccatgaaaaaggacttcatattggtgcgagacatatgactgtttcgacgagtggaattatcccgaaaatttataagtttgctgaagaagatctacaaattaattttgcgatttcattgcatgctccaaactcagaattacgttcaaaattaatgccgattaaccgtgcttataaattaccagatttaatggaagctattaaatactatgtaaatagaacagggcgtcgtattacttttgaatatggattatttggaggagaaaatgaccaagtagagcatgctgaagagcttgctgcgctcttaaaaggtgtaaaatgtcatgtgaacttgattccggtaaactacgtacctgaacgtgattatgtacgtacgccacgtgaacaaattttcttgttcgagaaaacgttaaaagatcgtggagtgaatgtaacgattcgccgtgaacaaggtcatgatattgatgcagcctgcggtcagttgcgtgcgaaggagcgcaaagaagagacgaggtgacgagatgaaagccgtatttctatcggataaaggaaaagttcgtcaacataatgaagatagtgcaggagtttttcacaatttagatggaaatgtattagcggtagtagcagatggaatgggaggtcatcgagctggtgatgtagctagctcgatggccattcaattattccatgattattggaagcaaacacataatatgaatgagccgaaaaaagtagaacaatggttacatactagtgttgggattattaatgagcgtatatatgaatacgctcagcaaaatgcagaatgtaatggtatgggaacaacgcttataatagctgtttgtacaccaagctttgtgacaatagggcatataggagatagtcgttgctatatggtatcagaaggagaaatgacgctagtaacggaagatcattcacttgtaaatgagcttgtgaaacatggtgaaatttcaaaggaagacgcagagtatcatccgaaaaagaatgtgttattaagagcattaggaacagaagaaaaagttgggttagatgttaaaacgttggtgattgaggaagatgatcaattacttctttgctctgatgggttatcaaacaaagtttctattgatgatatgcgacaaattttacagttaaatgaacagcttgaaggtaaagggcagtgtctcattcaattggcaaatgatcgcggtggagaagataatatcacacttgttcttattgattatgcgggttcgacaaacgaaagtaggtgaagtgcaacgtgctgattggaaaacgcttaaatgaccgttataagctgctgaaaatgattggtggtggcggaatggccaatgtatatttagctcatgatgatatacttggccgagatgtagcggtaaaaatattaagactcgactactcaaataacgaagagtttattaaacgtttccatcgagaagcgcagtctgttacaacgttgtcgcatccaaatattgtgaatatgtatgatgtcggagaagaagatggtatatactatcttgtcatggaatatgtaccagggcaaacattgaagcaatacataattgagcgagggatgttacctataggagaagctcttgatattatggagcagttaacatccgctatggcacatgcccatcattttgaaattgtgcatcgtgatataaagccgcacaatattttaattcgagctgatggaataataaaagtaacagattttggaattgcgacagctacaagtgcaacaacaattacacatacaaattcagtgcttggttcagtccattatttatcaccagaacaggcacgtggcgggatagcaaataaacaatcagatatctattctcttggaatagttatgtttgaattgttaacaggaagacaaccgttttctggcgaatctgctgttgctatagctttaaaacatttacaaagtgaaatcccatcaccaaaaagatggaatgaaaatattccgcaaagtgttgaaaatattatattaaaggcaactgcaaaagatccgtttcaccgatatcaatctgccaatgcgatgaagcgagatattgaaactgcgctatatccagagaggataaatgagcaaccattttacataccggaagatatggaagcgacgaaagcgattccgattattcaacaagaacaattatttgaaaatgtaagtgatgaaacgattgttttaaaagggagtaaggtggaagaaccgataagagcagaagcagctgagttagataagaagaaaaaacggagtaacaagtggcttaaagttttaatttcaacatttttatttttagcaataggaataacattagcacttacggttattccaggattatttattccgaaagatgtgaaagttcctgatgtggctggtatgaaatacacgacagctgtaaatacattagtagaaaagggctttgaggtgacggagcctaatattgtatatacagatgatgttgaagttggggatgtaataaaaacggaccctgtagcaggaagagtcgtaaaagaaaacgctaaaattactatctatcaatcaggtggaaaaaagaaaagtaagatggcaaatttcacaggtcaaaactttgagagtgtaaaagctgagttagaagaaaaatataaacaagttacggtaaattatattgaaaatgataagccgaaaggtgaaattgtagaacaaattccgacgcctgatcagatggttatagaagcggagcaagaactgaaaatctgggtaagtaaagggccttatcaaattagaccaggtgacttttcggggtggactgaaaatagtgtaactggttatttgaatgagagaaaactaacgtcagatataaaacgagagtattcagatacagtcgaaaaaggacttgtaatttcgcaatttccaaaaccaggtacaccattaaaagagggagataaagtaactattattatctctgatggtcaaaagcctaaagtgactaaaacggtaaaagtggacaatatctctatcccatatgagcctgctgtaacaggtgaaaaaaagccgcaaacaatagaaatttataaagaagacatgcagcaaaaaatggatagaccggttgaaacgagaacaattactgaatcagcgactatttctttagaatttgtaattcaagaaggttcaaagggacactataaaattgtacgggatggagtaacgattattgataaagaagtaccatatccaactcaataatagtgaaagtctacttattattattgcctgttatgctgtctacaaagtggacggtatagcaggcaaaaatatatgattcaaaaagctagtaaagtgatgcagctgtaaatatttttttgcatttaatgggaaattcaatgtatattagcgaaagtatatatggtaggttttgaaatcgttatttggaaaatttaaatccattcatttttaaattcagcatcaccttatacaaaaaaggagaattctatgccagaaggaaaaattataaaagctttaagtgggttttattacgtgcagcatgaagaaggggttacgcaatgtcgtgggcgaggtgtatttagaaaaaataaaattacaccacttgtaggagaccaagttgtttttcaggcagataatccaactgaaggttatgtgcttgaagtgtttgatcgaaaaaatgaacttgttagacctcctattgctaatgtcgatcaagcgatccttgtgttctctgcagtagaaccagattttaatcctggactgttagatcgatttttagtgctgattgaatatcataacattaagccaattatttgtattagcaagatggatttagtagatgaaaagatgaaagcaactgttgaagcttatgcgaatgattatcgtgagatgggttatgatgttttatttacttctattaatacttcagaaagtattgatatattaaaaccatacttagaaaattgtgtttctgtcgttgcgggccaatctggtgttgggaaatcttcaatgcttaatgtgctacgtccagaattagagctgaaaacaaatgatatttcttcccatttaggacgcgggaagcatacgacaagacacgtagaattaattgcaattgggagtggactagtagcagatacaccgggttttagttcactagatttcattgatatagaagtagaagatcttacatattgttttccagagttgaaagaagcgagccaatactgtaaatttagagggtgtacacatctttctgaaccgaaatgtgcggtgaaagctgcggttgaagaagggaagattacagaatatcgctataagaactataaacaattcgtagaagaaattagagagagaaagccgaggtattagttatgattaaaattgcaccatcgattttatcagcagatttttcaaaattaggggaagagattaaagatgtagaaaagggcggagcggattacattcacgttgacgtaatggatggacatttcgtaccaaatattacgattggaccgttaattgtagaagcaatccgtccgattacatcattaccattagatgtacatttaatgattgaaaatcctgataactatatcccgactttcgcacaagcgggagcggatattattactgttcacgtagaggcgtgtccgcatctacatcgtacaattcagttaattaaatctcatggtattaaagcgggcgttgtattaaatccacatacgccagtttcagtgattgagcatgtattagaagatatagatatggtattacttatgacagtaaaccctggatttggtggacagaagtttatccattctgtattaccgaaaattaaacaagttgcagacatggtgaaagagcgcaatctagaagtggaaattgaagttgatggtggtgtaaatgctgaaacagcaagactttgtgtggaagcaggagcaaatgtacttgtagctgggtcagcagtatacaatcaaaaagaccgcggtgaagcaattcgcgtaattcgtgggtagtgatgaacttttatcctagtaaggcatttataggataggataaaaatatgtaaaaaggcaatctaccgaatggcagattgcctttttacaatggaaggagaagaaaaaatgattattcatattttggcaggaggaccttcggaatattgcgcagattttgctcgatacgagaatgaggaagtagtgtgggcagcggttgataggggagtataccgtctattaaagaaagggattaccccggctgttgcgtttggagattacgattcagttactgaagaagaattagtatggatgggacagcaaacgaacgaattacatattgttccgcgggaaaaagatcaaacggatttagaaattgcaatcaactgggcattagaacagaagccgacactaattcgtatttttggtgctactggtggaaggcttgatcacggtttggcaaatatacagatgcttttaaaagggttagaagtagagatagaaatgtgtattgtggacaataaaaatgaaataacagttaaaaaaatgggtacacatataattgaagaaaataaaaattttccttatgtatcttttgtaccagttactgaaatagtggaagggattacattgtttggttttaagtaccctcttactaataaaacaatagagtggggatcaacactttgtattagtaacgaactcgttgaggaaaaaggtactttttcatttacttctggcatattaatgttgataagaagcactgattgaagaaacaattttgctccttacatcatatagtgaccaagtggagtaatggggattaggagggaaaccatgagattttatacaattaagttacctaaatttcttggtggaatagttcgtgcaatgttaaataccttcaaaaaagattaaaaaaagcacctatcaccggtgctttttccattgttatagtaaaaaaagagcctatcggctcttttttttattattaaacacgttcgattttgccagattttaatgctctagcagaaacgtaaacacgttgaacttttccgtcgatgcgtacgcgaactttttgaaggttagcgccccacttacgttttgtagcgttcattgcgtgagaacgagagttaccagaacgagcttttcttccagtaatagcacaaacacgagccatttatatttccctcccttgataccttaccatacgtaatttttcaatgttagtcttttatgcgatgctaaaaacactactataatttaacacaactaaaaagagaatgcaacaccgtagaaaaaagaaatcaagaaaatttacttgacactatatgtcaatgaagaaaagttgaaatccataaaaattgcttgacatattatagtggtacatgttgtataataacaatggactattttgctcatcataaaaaagtgtaatttaaaacataaaatatgagagtgaaaagaaagaacgatggaattttctttaaaaagattatatgatagtaactaaagtagtctagctcactttcaccatttatgaagggggaaacgagatgtcaattgaaattaaaacgaagtacggtcaaattgatattagtacagatgtaattgcaacaattgctggaggtgccgcggtagattgctacggtatcgtaggtatggcatcaaaaaatcagttaaaagatggattaacagacattttacgaaaagaaaacttcactagaggtgttattgttcgtaaagatgaagatgaagtacatattgatatgtatattattgtgagctatggtacgaaaatttcagaagtggcacataatgtgcagacgaaagtgaaatatacattagatcaaactgtaggactagcagtagattctgtaaacatctacgtacaaggagttaaagtaataaacttgtaatgtgcattaaggaggaaaatctgtgtcaattcaaaaaattgatggaaaacgtttatcacaaatgatcatgcaaggagcgaataatttaacaaacaatgttcagcttgttgatgcattaaacgtatttccagttccagatggcgataccggtacaaacatgaacttatctatgacttcaggtgcgcgtgaagtgaaagcaaacccttcacagcatgctggtaaagtcggcgtaagtttagccaaaggattattaatgggagctcgtggtaactctggagttattttatctcagttgttccgtggtttctctaaatccattgaacaaaaagaagaattaacaacagttgattttgctgcagcactagaagctggagtagaggcggcttataaagcggttatgaaaccgattgaaggaacgattttaacggttgcaagagaaacgggtaaatatgcagtaacagttgcgaaaaaacagcgcgactttgttttgtttatggaagacgttgtgaaagaagcaaacgcatcgttaaatcgtacgccagatttattacctgtattaaaacaagttggcgttgtagatagcggtggtaaaggtcttgtagtggtatacgaaggatttttagctgacttaaaaggagaaacgatttcttctgatgcaccgacgcaaccatctatgaatgaaatggtacgcgcagaacatcaccgtagtgtacaaagccaattgagtacagaagatattaagtatggatattgtacggagttcatggtgaaattagaggctgaaaaggtgaaagagcataatttctctgaacaaaaattccgtgaagatattagtgtatatggtgattctctactagttgtgtctgatgatgaaattgtaaaagttcatatccatgcagaacatcctggagacgctatgaactacgggcaaaaatacggtagtttaattaagattaaagtagaaaatatgcgtgaacagcatactgctttattagatgaacctactatggttcctgaacaaccagctcaatcgaaagaaaaacaaccatatggtatcgtaactgtagctatggggtctggtattaaaactttatttgagagcatcggcgcaacgaaagttatcgaaggtggtcaaacgatgaatccaagtacggaggatatcgtgaaggcaattgaagaagcaaatgctgaaaaaatcattattttaccgaataacggaaatattgtaatggcagcagaacaagcggcatcagttgtagatcaagaagttattgttgttcgttcgaaaacagttcctcaaggtatggcagcaatgttagcatttaacccagttggaacgttagaagagaatgaagaaaacatgcaagaagctttatctcatgtgaaaacaggtcaaattacgtatgctgtacgtgatacggaaattgatggtgtagcaattcaaaaagatgatttcatgtgtattgcagatgggaaaattgtatctacaaatgctgaaaaagtaggagctgcgaagcaattactagaagcgcttattgatgaagattctgaaatcgtaacgattctacaaggtgaagatgcaactgacgaagaagtagcggagttagttgaatttgtagaagagaaatttgaagatgcagaagtagaagtgcatgctggaaaccaaccagtgtattctttcatcttctctgtagaataagataagattcgttttgaaaataaatggattacttacttgctaatggataagaagtagtaatatgaaggttattactagtttttattcaaaaggctagcatattgaagagagaaaagagccttgctgctaatagtgaggctcttttttacttgttttatataagggatttgagtagtttctcttagaatgcctatgatagaatatataaggtgaaagagagcgattacagatgctaattggtactcaaataaaatgcaataaagaaaataatgtgacggggtgtgagaatcttgaatgatgttgtacaagttcctgttacggatgtaaaggggataggaggagaaacatctgagttactacatgagatgggtatttatacagtttctcatctattagaacattttccgtaccgttatgaagattatgcgatgaaagatcttgctgaagtaaagcatgatgaacgtgtaacggttgaagggaagattcatagtgctcctttgctgcaatattatggtaagaagaaatcgcgtttaacagttcgtgttctcgtcggtcgttatttaattacggcggtatgttttaataggccttactataagcaaaaattaaagttagatgaaacggtaacgattactggtaaatgggatcaacatcgtcaaacaattgctgtatcagaacttcattttgggccggttgtacgtcaacaagaagtggaacctgtttattcagtaaaggggaaacttacagtaaaacagatgcgtcgttttattgctcaagcgttaaaggaatatggagattctatagtcgaagtgttaccggatggtttgttagggcgatataaattattaccaagatatgaagcgcttagggcattgcattttccggtaggacaggaagatttgaagcaagcgcgtcgccgttttgtatatgaagaatttttcttatttcagctgaaaatgcaaacgctccggaaaatggagagggaaaattcaaaagggacgaagaaagagattccgtcagtagaattacaagaatttatcgatgcactgccgtttccattaacgggtgcgcagcaccgagttgtagatgaaattttgaaagatatgacatctccttatcggatgaaccgactattgcaaggtgacgttggttctgggaaaacagttgttgctgcgattggcctttatgcatcgaaattagctcattatcaaggtgctttaatggttcctacagaaattttagctgagcaacattatcagtcgcttgctgaaacgttttcgcattttggtatgaaggtggaactgttaacaagttctgttaaaggtgcgagacgtcgagaaattttagcgaagttagaacaaggagaaatagatattcttgttggaacgcatgccttaattcaagatgaagttatatttcataggttgggtctcgttattacagatgaacagcatcgatttggtgtagcgcagcgccgagttttacgggagaaaggtgaaagtccagatgtattatttatgacagcgacaccaattccgcgtacgcttgcaattactgcatttggagagatggatgtttcgataatcgatgagatgccagcaggtagaaaggtgattgaaacatattgggcaaaacatgatatgttagatcgcgttctcggttttgttgaaaaggagataaaaaaaggaagacaggcatacgttatttgtcctctaattgaagaatctgagaaacttgatgtgcaaaatgctatcgacttacatagtatgctgacgcatcattaccaagggaaatgccaagttggattgatgcatgggagattatcgtctcaggaaaaagaagagataatgggacagtttagtgaaaataaagtgcaaattcttgtatcgacaacagttgttgaagtaggtgtgaacgtaccgaatgcgactgtaatggttatttatgatgcagaacgtttcggtttatcgcagcttcatcagcttagagggcgtgtcggccgtggtagtgagcaatcatattgtttattaatagcagaccctaaatcagaaacagggaaagaaagaatgcgcataatgactgaaacaaatgatggatttgtattgtcagaaaaagatttagaattacgaggtcctggagatttctttgggagtaagcaaagtggcttaccagaatttaaggttgctgacatggtacatgattatcgagcgttagaaacagcaaggcaagatgcggcgatactagtagattcagaagcgttttggcacaatgatcagtacgctgccttgcgtacgtatcttgatgggacaggggtgttccaaggagagaagctcgattaaagggagtcaacaaaattttttgttgcattctacttttaatgattatatactactgttagtacctagtcataaaaatggatggtgcggtatgaaaaaaagaagaagtaaaaaagaaagacaagagttattacaacaaacaatcgaatcaaatccttttattacggatgaagatttagcggaaaaatttcaagtgagtatacaaacagtacgacttgatcgtatggaattgtctattcctgaattaagagagagaattaaacatgtagctacaaagcaacatgaagaagatgtgaaatctttaccgttagaagaggttgttggagaaattattgatattgaattagatagacatgcaatctctatctttgaagtaaaggtagaacatgtatttaaaagaaatcaaattgcccgtgggcatcatctgtttgcgcaagcaaactcactagctgttgcagttattgatgaagaattagctttaactgcaaagtctaccattcgatacattcgccctgtaaaattaggagagcgtgttgttgcaaaagcgcgcgttgaagatgtagagaatgataagggacggacggttgtcaaagtgcgtagcttcgttggagaagaacttgtttttacaggcacttttgaaatgtatcgatctagtaattatagtgaggaaggtaacaacttatgaaaatcgcaatagatgcaatgggcggagatcacgctccaaaggctgtagtattaggggcaatgaaagctattaaggaatattctgatttacatattacgttagtagggaaagaagaggaaattcgtcaatacttaacgagtgatgaacgaattactattcttcatacagacgaaaaaatagaatcaacggaggaaccagtaagagcggttcgtcgaaaaaaacaagcttcaatggtgcttgcggcacaacaagtaaaggatggagaagcagacgcttgtatatccgcaggtagtacaggagctttaatggcagctggattatttgttgtcggtcgtatggaaggaattgagcgaccagctttatcgcctacaatgccaactgtagatggaaaaggttttgttatgttagatgttggagcaaatgttgatgcaaaaccaattcatttatatcaatatgcagtaatgggatctgtttatgctgagaaggtaagaggaattgaaaatcctcgcgttggactattaaacgttggaacagaggatggaaaaggaaacgagctttcaaagcaagtatttgcaatgcttaaagatgcgccaattaatttcgttgggaacattgaatcaagagatttattgcaaggtgtagcagatgttgttgtatgtgatggttttacagggaatgtagcgttgaaatcattagagggaacagcacttgcgctattctctatgttgaaagaacaattaatgagttcatttacgagtaaattagcagcggcggtattaaagccaaaacttatggtattaaaagataaaatggattattcggagtatggaggagctgcattatttggattgaaagcacctgtcattaaggctcacggttcttctaatgaccagtcgatatttagtgcgattcgtcaaacgagagaaatggtagcgaaagaagtaattcctacgatttcaagcgtaatggagaaagagtcactccaataagaggaggatttgaaatgggaaaaatagcatttctttttccgggccaaggttcacaggcagttggaatgggtaaacaattagcagagaataataaagaggttgcaaaagtgtttgcaaaagcagatgaggtgttgcaagattcactttcagaagtgatttttgaaggaccgcaggaaaagcttacattaacaacaaatgcgcagcctgcattattaacaacgagttttgctattttgacagctttgaaagagtatgacattacacctgactttgtcgctggtcatagtttaggtgaatatagcgctcttgtagcagctggtgcattaacttttgaagatgcggtatatgctgtaaggaaacgcggggaatatatggaagaagctgttccgggcagggaaggtgcaatggcagctatattaggtgctgacccacatatgctgaaacaagttacagaagaagtaacaagtgaaggatatgcagtgcaaatcgctaatatgaatagtacgaagcaaattgtaatttctggaacgaagcaaggcgtagaggttgcttctcaaagagcgaaagaaaatggtgcaaagagagcaattccactaaaagtaagtgggccattccattcttcacttatgaagccggcagctgagaagtttcaaagtgttttgaatgaaattacaattcatgatacgaacattcctgttattgcaaatgttacggcggatgttattacacgtggtgccgacattcaagaaaagttaatcgaacagctttattcgcctgtattatggtacccgtctattgaatgtatggtgaagcagggagtagatacatttattgaaattgggcctggaaaagtacttgctggacttatgaagtcaattgattcatcagcgaaagcatatgcgatatatgatgaagagacattaaaagataccatttcaaatttgagaggagaaaactgatgttaaaagggaaggtagcattagtaactggcgcttcacgtggaattggtcgcgcgattgcgatcgatttagcgaaacaaggggcaaatgtagtagtaaattatgcaggtaatgaacaaaaagcaaatgaagtagtagatgaaattaagaaattaggttctgatgcaattgcggtaaaagcagatgttgcaaatgctgatgatgttacaaatatggtgaaacaaacagtagatacatttggacaagttgatattcttgtaaataatgctggtgtaacaaaagataatttattaatgcgtatgaaagaagaagaatgggatacagttattaatacaaacttaaaaggtgtattcttatgtacaaaagcagtatctcgttatatgatgcgtcaacgtcacggtagaattataaatatcgcttctgttgtgggtgttataggaaacccagggcaagctaattatgttgctgctaaagcgggtgttattggattaacaaaaacatctgcaaaagagttagcaagtcgaaatattactgtgaatgcaattgcgccgggctttattgcgactgatatgacggatgtactagatgagaatattaaagctgaaatgttaaaagttattccagctgctcaatttggtgaagcgaaagatatcgcgaatgctgtaacgttttttgcttctgatcaaagcaaatatgttacaggtcaaacgttaaatgttgatggcggtatggtaatgtaataaaagaatcgatttcacctagtttttttggtcaatatttaatataatatttgaggggaggtgaatggaatggcagatgttttagagcgcgtaacaaaaatcatcgttgatcgtttaggagtagaagagactgaggtagtaccagctgcaagcttcaaggaagatttaggagcagactccctagatgtagtagaacttgtaatgcaattagaagatgaattcgaaatggaaatttctgatgaagatgctgaaaagattgctactgttggcgatgctgtgacttacatagagagtcatctataatgcttaagtgaagtcccgttttttagcggggctttctggcttatatctggagggacctatgccgtaccgaaaatatagagaaaaaaaatacgaaacaaaatatcgtgaagcatttaaagtgtttcaagaaaagataggtattacgtttacagatgaaaaattattgattcaagcatttacgcattcatcgtatgtgaatgagcatcgaaaaaaaccgcatgaagataatgagcgtcttgaatttcttggagatgcagtattggaactgactgtatcacagtatctgtttcaaaaatatccgacaatgagcgaaggagagttaacaaaactacgtgcagctattgtatgtgagccatctcttgttcgttttgcgaacgaattgtcatttggcagccttgttttattaggaaaaggtgaagaaatgacaggtggacgtgaacgaccagctttattagcggatgtctttgaagcgtttattggtgccctttatcttgatcaagggctagaaacagtttgggaattcttaaaagaaattgtatatccgaaaattaatgagggtgctttttctcatgtgatggattataagagtcagttgcaagaattgattcagcgtgatggcagtggcaatgttgagtatcaaattttgcaagaaaaaggaccagctcacaatcgagaatttgtgtcacgtgttacgttaaataacgtagctttaggtcttggtagtggtaagtcgaaaaaagaagcagagcaacaagctgctgcagaagcattgaaaaaattaaaagaacaactataaggaatccccctttgaatgagggggattccttatgcatagaatgaaactttctttttgtttataaagaaaaagaaggtaaatccgtataatacttgtttttatatagagaacatttataacggcggagaataggaggaaggcctttcgtgtttttaaaaagattagaaatagcagggtttaagtcttttgctgagcgtgtatctgttgattttgtcccaggtgtaacttctgtagtaggacctaatggaagcgggaaaagtaatattactgatgcaattcgctgggtacttggtgaacaatctgcaaaatcattacgtggtgcaaagatggaggatattatttttgcaggcagtgatacgaggagagcggttaatgttgctgaagtaacaataactttaaataatgaagatcaacgtttaccaattgaatacaatgaggtgtgtgtaacacgtcgtgtatctcgttcaggtgatagtgatttttatattaataaacaatcatgtagattgaaagatattatcgatttatttatggactctggtatgggaagagaagctttttcaattattagccaggggaaagtggaagagattttaagtagtaagtcaggcgcgacacgtttctctataagcgtttagacgtgaagtgagagtgttgctgaaagattttgtacatgcttaaacaagcgaaaatgtacatgtttatcttgacatttacagagttactcatttttctatcactcctttcatttcgtcctaattactataaccatttaggaggataatcatgagttagaagttaggcacttaattttcttcgataatgtaagtaaaatattccatacataacaaatagcatgagtaaaacttgtaactctacattttcctttaaaatagctgcgatagggtctggtaagtacggtgatttatcgtttgtgtttaaacctaaccatttatttaagaggctaatggtacaaaacataaaaacaccggaccagcttgccgtaattgctttttgtttaatttttgtttcacgttcatcatctgtaatccaaggattagcagttttatcccgcattaacgggcagtaagacccccacctcaaaattcagcggaggcaaagaagttaggtggggatcaactgtccgtaaaagcccgattggttcaactaataatccgtgggggatgaacaaaacccccacggattaaagtttcactttatcactactaaaaaatccatttatgtatccccatataatcattccaattaagatggttatccatttcatattttttgattcacttctcccttgtaaaaagtgttttacatatcagtttttcatatagcaggaataaagtataagatagggaagaaatatgtaagaggatttcataaagagaggaggaagaggatgaaaatcgtttttgttcggcatggtgaaggtgaacatacaacggatttaccagaaagtttacaagtgtttgacccaccattgacgagagtaggaaaggctcaagctaaattacttcaatgcaatgtgccattgcaagagacggatatattaattgttagtcctacacttagaactttgcaaacggcgacaatatggagtgcgaaagttgcttgtcaaaaactagtccatccatatgtatccccacgtatttttccttatcgagaaggagcgaaaacattaccgtgcgattatatagtagatcagggaatgataacaaagttatttccgcatttttcgatagagaaaagctcaaataatcagttatggaaggaaggtataaacactatttcagagaatagttttcagcaaatagtagatgaatttcttctttggtgttatgaactgggtgctgaaagaatttgcattgtatctcacgatggaacaattacagcatataggcaatatttacagaaagtcgttttaactagatcagattttttgaaagaaaggggcatatatgaaatggatttatcccataaaattctgattgataagggctgattataggatgggggttgtatgttgaatattgcattagtagttggttttaattcggatttagaagcgcaatcaattcgagcatctcttgaatattttggtgcaagggttgtgacatattggattggtagaccgaaagattttgtggaagttctttctggaaagaacttatttaacaatattaattatattattttttgctttcatggtgaagaagggaagtttgtcatggaagagttaggcgaagaagtatatgaacaagatgaaccgagaggggattttggtacagaagaaatttataaatatgcaaaattgcataatacacatattgtaaatagcgggtgcacgttaggggagcaaaatctagcaaaatcttttttacatagtggtgcgaaatcatatattggatcgattgattatgtagatggaaatgcagcacttatgtttactatacgcttattttatggggttattaaccatgggaaaacgttagaagaagcgtttcaagaagcgagtttaattgatgaggagacacatacatttcgattctataattagtgtgaaacaagtttattctatattcgaataaacttgtttcacatttaactcacatttttttacatttttttcaatgaaaatggttatcacttgtggtatgatatgttcaagtttttacaggtaataaaagttactatataaacgttagtttttaatgtttcatacgcatgtcacagattattcataattaacgtttgaaaaataagtaactaatgttattatattatctgtaactaacttaattacaactttaggaggaagatatggttattcaatttttaagagaaaacaaagcagtttcttttgcattagcagtaattcgagtatatcttggttacacatggttaatggctggaatcggtaaactacaaggaaaaggattcgatgcaacaggttatttgcaaggggcaattgaaaaatctaaaggtgcacaaccggctgttcaatcttggtgggcatcattcttacaagaatttgcaattccaaatgtagatttgtttaatacacttgtaacatggggagaaattttagtcggaattggtttaattgtaggctgtttaacaaaaacagcggtcttttttggtcttgtaatgaacttttcctatatgtttagtgggtcaattggtgtgaaccctgagatggttatcttatctatgtttgttcttgtttccggtatgaacgctgggaaatttggaatggatggcttcgttatcccgaaagtattaggatcaaaaactccaaaacgccaaaagcaagctgcttaatatatgaaaacgggtatctcattttgagatacccgtttatgttatttttcaactttaatcggattgttcttaaagaaatcttttacatacccgacaaattcttgtggttcttggcgaaatggtgcatgataacctttttcaataatatgtaaagtgctattttttaagaattgatgatacgtttctccttctttccaggaaacgctactatcatttctgccccatataattaaagttggctgttttatttcatttgcattaattttaagacgtctaggccataatttcattttattataatgctcttcatcattacgtttgaatttcactttgctttcatcataatctgtaatagaagaaacggcatttaaatcagtcgacaattgtggttttggtgagccttgtttattaacgaatgtatgagggccacctgtagcatcagttaaaataaggtgagtaactgcttcaggatataaatatgttaaatttagagaaatttctccccccatggaatgccccagtattgcgaatgaatcataccctagttttttcattaatttataatacaaatttgcatgagttggaaaagaataataaaaatccattggcttagatgagcgcccgaatcctaaagcatctacagaaataattgtatgatcttttgctaaatcggagtaaatcttttgaaaaccatctgatgaccctccaaagccatgaatcataagtaaaggtggtttttcattaccaatctttttaaagtaaatggtttgaccatctatttctaccattttttcctcggtagctagtttcgctgtaattgtatttttaacttgttttacttgttctactggcttttctgctgcactacatcctactaatagtgtaagagtaagacaacctaccataaaatagctaaatcgcttcaattaggtgtctcctttctaacataacgctgtatctatcatagcaaatagcatattacgatttccaggaagttggctaccattttttatcataagaggtgaaaggagcgtttcttggaaattttctgtttgaagaaattgacgaaatgtaaattgtgagtgtggaacatcaattcgtactataccattccaacattcacatatcttttttaataattggatagcatcttcttcttgctgggcgataagtggattgatacataatatattgcccttttgtatgcataatgaaaaagcttctatacagttatttctttcaattttaaaagagtgtacggcccttggtaatagcaaagagtaaagtagagaacgattcataccagttgcaatttgatccagagaagtaacaggtataaggtcttcttcttgtacttgttgtaagtgagaagggtacgtcttaatagtttgcttttcaaaacgatgaatcgttgttgctgtttgaaatccgcatgatgtgtatagaggttcgccagcttttgtcgcaataagtgcaatgggttgttttggatgaatttgttccaagcaatgatttagcaacatgcgccctattccgcgtccttgaaaattagggtgaacaattaacataccaatggaagcgaagttacttgtaaagggaaatactcctccagtcgcaatgagtttgttttcatgaatgtaacctacaagtgtgccgatagaaagatacatttcgaattgttttttcataaaaatttcatcgtgtaaccatccaacagatttgcaaagattaagtaattcaaaaataaaagattcatttagctttactattttcataaaggctcaccgcatttctatttattttcataaacatagagtcaaaatgtaaaaaaagagatttacgttaaatgaaatccaacttgtttatatttaaattgtaaagggcggaatgattgatacaaaaagacaaacttatacaaattataactgatatttacataagttaacaaaaaatttacatacagctaattttctcttaatagtcttccattaaatttgatagtgggaaatgaataacctaattagggggacaagacagtgaaaaagtttgtgaaaaaagcatggccatttgcagttgtggcatcattagcagttacttcggtagcaacatggaattttactcgttctagtgaggttaatgcagatgagaacggaagcaatgcaaagattaaaaatgttatcgtattaattggggatggtatgggtccttcatatatgacggctcaccgttatatgaaagataatccaaaaacctttgaaatggaatctacagaatttgataagcatcttgtaggaacacaaaaaacatacccagaagatgaacatgaaaatattacagactctgcatcggcagcaacagctatgtcagcaggaattaaaacatataatgctgcaattgcagttgataatgataaagcggaagtgaaaacagttcttgagcaagcgaaagaaaaagggaaatcaacgggactcgttgcaacttctgaaattacacatgcaacaccagctgctttcggtgcgcatgacattagccgtaaaaatatggacgcaattgcaaatgattattttgatgagaaaattaaagggaagcataaggtagatgttatgcttggcggcggcgtaaagaactttgttagaaaagatcgtaatcttacagaagagtttaagaaatctggttatagctatgtaacggatcgagatcaattgttaaatgataaaaatgatcaaattcttggtttatttgcaccaggtggattagataaaatgattgaccgcaatgagaaaacaccttcattagaagaaatgactaatgcagcaattgagcgtttgaacaaaaataaaaatggtttcttcttaatggtggaaggaagtcaaatcgactgggctggacatgataatgatattgttggtgcaatgagtgaaatggaagacttcgaaaaagctttcaaagcagcgattgagtttgcgaaaaaagataaaaatacgttagttgttgcaacggcagatcacgctactggtggcttatctttaggtgccaatggcgagtataactttaaagtagatccaattaaagctgcaaaacgcacaccagactttatggcaaatgagattgcaaaaggtgcaaatgtagaagaaacattgaaaaagtatattgatttacaattaactccagaagaaattcaagctgtaaatgatatagctccgtcaaaagatgtaacaaagattgataatgcaattgaagatattttcaataagcgctcggttacaggctggacaacaggtggacatacaggggaagatgtgaacgtgtatgcatttggtccaggtaaatacttgttctctggcgttcaagagaatacaaatatagcgaaacgtgtctttgatattgttggtggcggtgatccgaataaaggaagacgctaattaagagcgaaagtgaggcgaactgcctcgcttttctttttaggagttggaaatatgaaaaaaatatttgcgaaattaagattccttctagcatttgtagtattactagttggatgtcaacaagaagagaataatgtagcacaaaaatctactactaaaaaaactgaggaaaaggtacaaataacaaaagaagaagagaaatctattcaagatgttattcatacatttgtgcgaacgaccaatgaaaaaaatcttgcagaacatatggagttattttcaaagaagatgcctagtgctgaagacttaaaaacacaaaaagaagccgcatttcaaaagggaaataagaaaattgaattggaacatatagatatgaaagttagtaaagtagggtatgttattgttgaaacgaaagaaaaggaagtagacgacagtattactcttcaaaagaaagtacagtatgcccttggaaaagaagaggataaatggaagattgaagaggttcgaacaatagagaaaaaataacgtgaaactttaataagtgtggagtcatacttcccaaaaatgatagaaaaaaggttctcattggcgagaacctttttttatagtggtagcataatttgatttgaacatgcctcaatatcatcaatatcttgacgaattgtggccattttattatccagatcttcagctttcattgctgcatcatgtagttcatcttttaaatactccggtattttcccttcatatttataataaagtttgtgttctaaacttgcccaaaagtccattgccagtgtacgtaactgaatttctgcaaatacatcttttgtaccagaatttagtgataaagggtatttaatgatcatgtgtaaacttttatatccgtttcgttttgggttagcgatataatcttttacttctatgacttccatatcttcgcgtttttgaatgacttctttcaaatgatagatatcttctacgaagcaacatgtaatacgaataccaataatatcttgtaaatgtgtttgagcattttcaactgttggtaataagcttttgcgctctagttttttaataatactttcaggttgttttagtcttgtttttatatgttcaaacgggttgtaatcctctagaaattgagcttcccggttcataatttcaaatttagtttttaactcttctaaagcaaatgtatatggtaatacaaaagctttccagtagttaactgttgattgattatattccatttatatacacaccttttcctatttgcaagtgaggtcgttattatactaaataccaaatcatataagcgcaagcagcaaatgatgagatcataaagcgatatttagttttcatactttcaactcctttcgagtaagattttatataaataaacgtgattgttaataagttcactatgtacagtttctatagtaatagattcgtgtgaatttcgtatgaactaattgtttcagctttttgtcttttttgctgttaatcataattattattcggatttaaagtgtttttatttgatttatctatttgtataaattaatgtatatttaaatttacagttatcgaggaggatatatggtgaactttgaagaattagcaattgctagacgttctgcaatgaaatttatacaaggtatagaaatccctgatgaggattttaaaaaaatatttgagttaactaagctttctccatcttgctataatttgcagcacacacattatgttgtaattcgtgatcaagagcgaaaagaaagattaaaagaattagctttcggtcaatataaagtatcgagtgcatcagcggtagtgctcgtttgtggtgataaaaaagcataccaaaatgttgaaaatatttacttcggtatgaaagttttaaaaatgattgatgaatgtgaatatgaagatacaattaggcaaacgaaaggtttatatgaaggaaaaggagagcgtttcatggaggatgaagcgattagaaatgcttcgttaagcgcgatgacttttatgtacgcagctaaatattatggctatgatacatgtccaatgattggtttcgatgaaaaagcagtacaaagtgaattaaatatgccggagcatatagtacctgttttaatgattacgataggaaaaagtgatacgactaaaactcgcccacgaggatatcgaaagccgattagtgagtttgttacatacgaatcgttttaataaagtgaaacttttaatcagtggggggtcttactgcccgttaatgcgggagaaaatttatttaactataaaaacaaggggattctaaatggaatcttcttgtttttgcaattgacaaatggaatgaagttttataatatataaatcgtaatcattacgttttagttgcgatttttgaaagaaaggagaattaaatatgcgtgtaaatattacattagcttgtacggagtgcggtgatcgtaattacatttctaaaaaaaataaacgaaacaatccagaacgcatcgaattaaaaaaatattgtccacgattaaagcgagtaacgttacatcgtgaaacgaagtagaagactagagatatctctagtctttttttatagttctttggttttgtttgttataattaccttaaattgtaataaagggagcggtatgatgaatcaaaaagataaagaaagaaaagagcaagtggctcatattattaatattccagatgaatatagtcttgttgtagatgatcaagaagggggtgatgacccgtatcatctattatggtgggagcataaagaggatcaggagagaacgatacaaattacattgaatagacatactggtaatttaattgaatttaggatagatgatgaaaatcctttttcaagtggcaaggaagcgatagaggagaagaaggcaagagagattgcaaatgcgttcttgaaaaaatatacaaaagaaggatatgaattctatacatatgtaacggttaaggacgacaggcgcggttggaaagaagtaaattatatgcaagaagtgaatagctatccattgccgaatacagggtgcgttgtgcgagtgcactcttcaggtaatgttgtgcattttcattacaatggacaaaaagctatagagaaaaaaccgttatggccaagtgaaattgttgaggagaatatcgttttagaaaatttgaaagctagacaagatatgagacttgtatttatagatttaacatactcttcatgtgagtatgaaaacggggaagaagtaaaagggtaccatcttgtatatgaaccagagcctagtcatgcgtttattgatgcaagtacaggtaaagatttatttggaccagatcattataaattgccttcggctgtagctgttgaaaaatcgaaaaaaggtaacgaacgaggtgaagtattcgaattatttgactggaataaagaaggttttacaaaagtagatgagacagaaaatgatgatgaaataaggatgaaatttgttccgaaagaggaattacaaaaacagaaagaagaaaagaatccatatttaatgaatgaattctttaaaaagcatttaccgatgttgaaatataataatttagttagcgttacaattgataaattaaccaatgaattaactggttttataaaactgacagatgataaagaagtaaagcaaatactgtctagagaggaatgtttacaaagagcacttcaatttttagaacgagttattccagatatcacacaatatctgcgtctttgggaggaacgtgaagaagcagaagatgggattgaaagatttatcttttctgtatatataaatgatattccggcagagtataaccaatttatgattaacatcaatgcagaaaatggtgctgttatgcactactcgggggagtctagcaactttataaaagaattgctcacatatgaaataacaccaaaagtaactaaagaaaaagcgttagaaatatacagagaggctatccgagttaaattagaatggtttttagatcatgatgcagaggaaacgaaatacaaactactttacaaacaaacgacagatgaaaaacataaagaaccttttaattgtaggcgggaaattcgttatattgatgcccaagcggggagaaagatttggagtaagtaaaataaaagagttatttttcaaagaaaataactctttttatttttatactttgcctgttcgtttttcaaaagtaaatgtgataggaagattggaataagaactatcacttttaaatattactttccattctttagtatgggctttaatttcaaaattaagaagattcatcgctctacgtttatctatttctaaaaacatattatgaatctctggttcttgctgtaaattaagagcctttagtgtgactgtaaatgtgaaaaaattctgtccttcatatactatttttgatatttttgttttttgtttatttaacagcacataaaaacggtctgatggagttaattgtacagagtcatcagtaatttcattttcgctattatgaagttcaactaagtaagatgtactatgggaagaatcttttttgcttgtaatctgtaattcagtaggaatcatcggtatttcataaaaatcatttcttattatgttgttgtaatcctctgaaaatttacgaacttcttttgggaaagagtcatcttgtgtacttaaaaaagttttgttttgctttggaatttttttactaaaatttaatgtttctttaaagtaataattggatccagttaaaaataaacaactacagattaataaaaaaattcgatacggattttgaaagtgaaagaataatagtatacatgtaataattccaattacatagaaaataaagataagtagttctagttttgagtgaaaggagaaaccatagttatgaaaaaattttattccagttataatttgagctccaaaaaataaagaaattccaaattgaaaaaataataaatcaggccctcttttaataacaaaagtaatgaacgaaatgaaaagtaaaaatacccctaaataaattgttacatttaataatcgttctaatgtaatcatgaatagtgtcccctttaatagcatattcatatataaataacaattttatttaattataatataacaataaaatattttaaatgttagaagtgttgagttttataaataaactgtacagacacaaacaacctcacgcccacatacacataataaagaccactattttggcggaggtgaaaggtttgagtctattcgccgcaattggatatatggttcgagaagtgtttgtctttgtttcttatgtgaagaacaatgcgttcccgcagccgttatcatcagatgatgagagaaagtacttagagttaatggagcaaggtgatgctcaagcgagaaatcttttaattgaacataatttacggcttgtagctcatatcgttaaaaaatttgagaacacaggagaagatgcagaagatttaatttcaattggtacaatcgggctcattaaagcgatcgagagctattctgcaggaaagggaacgaagcttgcgacgtatgcagcacgctgtattgaaaatgaaattttgatgcatttacgtgtactaaagaaaacgaaaaaagatgtttcacttcatgatccgatcgggcaagataaagagggtaatgaaatatcgcttattgatatattaaaatcagagtctgaagatgtaattgatatgattcagcttagtatggagttagaaaaaattaaagagtatatcgatattttagacgaaagagaaaaagaagtgattgtgaaacgttttggacttgggctagataaggagaaaacacagcgggaaatcgctaaggcgcttggtatttctagaagctacgtatcacggattgaaaagcgtgctttaatgaaaatgttccacgagtttgtaagggcagagaaagagaaaaaagcgaaagagtaaagtgtattagaagcagccatatttaaaatgggctgctttttttattgtaaataagaaaagaaaacgcgttatgctaagaagaaatacacgttcactgttgaaaatgacggattctatctgtaatattagaaggtgctaaataatttaagaataataccatacttagttttctgtatatataataaggctgctttatatgatatgtgggaataagaaccaattttacatatgatatagaaagaaaagaagggaaaactaaagttatagactgattagggggtttcgcaatttgcgacgtacattatatcgacttatgatagaacttacaaatggtcgctttacttcttatatattacgtaaatttgcacaatctcgtttgagctctatcattattccatcgtacgcgaaagtttttcaaattaatcaagatgagatggaaaagggtttgaaggaatatagaacattgcatgaattatttacgcgtaagctaaaagaaggaaagcgtagtattgatacagatgcatcgagtatcgttagtcctgttgatggtgtttttgcagatcatggtcctattgaggatacaaaaacatttgatattaaaggaaagcgctattcaatcgtggatatgctaggtaatgaagaacgtgcaacgcgatatgcaggcggtacatatatggtaatttatttgagtccaagtcattatcatcgcattcatagtccgctttctggttctgtgactgaaagatttgtactcggtagaaaatcatatccggtaaatgcagctggtatggaatacgggaaagaaccactgtcaaaaaattatcgttctgttacagaagtaagcagtgatggcgagcatatggctcttgtaaaagtaggtgctatgtttgttaatagtattgagcttttgcatgagagagacactgttcaaaaaggtgaagaaatggcatactttacatttggttcaacagttgtgttattgtttgaaaaagatatgatagaagtagtgcaggaattaaagagtggacaagagcttcgtcttggtgaaaaaatagctactcgcttagctcataaataaagaaaagcttttataaccgtaagtaagagttatgggcaaagatacttaatgatgaaatcccctagatgggagtacttgtttattcgagagccatcgtaggatggctctttttacagggcatctaataatttatcctttaactgtttgattggtaagggctgattaaactttcactttatatgtaatcaagatgatttgacaagcttgtcctctaatgagcgtctaatgatttcttgttttataagtaaaatgaagtcgggatttaattttagttcttttgctttataataagactcagtgagtaactcagtggataactgttccatatgttttgttttcaaggtgagtcacctcctaataatataaggattgattcgttgatgcatttaatgtaccaaaaaaatatgacagtcacaaacgagtggttatccacatacctaggtggataaagtgtgtatagtttgttagtaaattccaaattaactgcaaaattaatgtggaaaatgtgtacaattttatccacaggttatatatcgaaaaatgttgtcgaaaaattttatgaaaaatcctcaaagaggtgaaagaaattgaaactatttttaccaaatgaatatgtgaaaaatgtatatcatgttcaaccagaagatttaaaaaaacgtgggattaaaggcgttattactgacttagataacactttaattgaatgggatcgtcccaatgcaacgccgcaacttgaaaaatggttcttggaaatgaaagagcaaggcattcaagtaacggtcgtttcaaataataatgagcaacgtgtgaaagattttgctgatccattaggtattccatttattcatagtgcacgtaaaccatttgttcgcgcatttaagcgtgcgatacaagagatgcgtttgcagccagatgaagttgtagtaattggagatcagttactgactgacgtgcttggtggaaaccgagtaggccttcatacaattttagttgtaccggtagcacaaacggacggattagtaacgcgctttaatcgaaaaattgaacgaagaattatgaaaaatatgaagaaaaaaggtttaattaactgggaggaataaagtttgactgaaacaattaaatgtattggttgcggtgtagaaattcaaacagaaaataaaaatgaagtggggtatgctcctgcctcatctttagagaaagaacaagtcatttgtcaacgttgttttcgcttgaagcattacaatgaaattcaagatgtatcgttaacagatgatgacttcctacgcattttaaatggaattggaaaatcagatgcattagtagtcaaaattgtagatatttttgattttaatggtagctggttacctggcttacatcgtttcgtagggaataataaagtattacttgttggaaataaagctgatttaattccaaagtcagtaaaacatgataaagtaaaacattggatgcgctatagtgcaaagcagctaggattaaaaccagaagatgtctttttaattagtgcagcgaagggacaaggaattgctgaactagcagatgctattgagtattatcgcggcggcaaagatgtttatgttgttggatgtacgaatgtaggaaaatcgacatttattaatcgtatgattaaagaatttagtgatgagactgaaaatgtaattacaacatctcatttcccaggaacaacactggatttaattgatattccattggacgaagagtcttctttatatgatacgccaggtattattaaccaccaccaaatggctcattatgttggaaagcaaagcttaaagcttattacaccaacaaaagaaattaagccgatggtattccaattaaatgaagaacaaacgttattctttagtggattggcacgttttgattatgtaagtggtggtcgtcgtgcatttacttgtcacttctcgaatcgcttaacaatccatcgtacaaagcttgagaaagcagatgaattatataaaaatcatgccggggatttattaagcccaccaacgccagaagaattagcaaatatgcctgagctagtgaaatacgaatttaatattcgtgaacctaaaacggatgttgtattctctggattaggatgggttactgtgaacgaaccaggagcaaaaattgttgcacacgtaccaaaaggagtaagtgtttcactacgtaaatctttaatttaatatggagagggatttatgaaacaattatatggtgtaatcggaaatccaattggacattcattatcacccgttatgcataacgatgcatttgaacacttgaatatggatgcccattatcatgcgttccttgttgaagaggaattgctaggggaagcagtaagaggtttaaaagcattaggtatttcaggatttaatgtaacaactccgcacaaggttgctattatggagtatttggatgagattgacccattggcaaggaaaatcggtgcagtaaatacagtggttcataaggatggaagattaattggctataacacagacgggattggttttgttcgagcgctgcagtcaattagtaatgaaccacttcaagggaaacgtattttgttacttggttcaggtggtgctagccgagctatttatttttctcttgctgatgtaggtgtaaaagagattgatgtagccaatcgtacagtagataaggcgaaggaacttattgctgcacgtacggccgatgttaattctgttgctttgtcgttagaaaaagcgacagaagaacaaggaaattatgatattatcattcagacgacaacgataggtatgcatccgcacgtagaatatacgccattacaaatttgttcgttaaaaaaaggaacgattgtatcagatataatttataatccatttgaaacgaaaattttatgtgaggcaaaagagcaaggtgcaatcattcaaaatggtattgatatgtttgtttatcaaggagcacttgcatttgaaatgtggacaggacgcaccccaaatatcgagagaatgaaacaattagttatagaaaagcttggaggctaacatatatgttaacaggaaaacaaaaaagatttttacgtgcacaagcacatcatttaacaccaatttttcaagtaggaaaaggcggagtaaatgaaaatatgattaaacaaattgcagatactttagaagctcgtgagttatttaaagtaagtgtattacaaaactgtgaatttgatcgccgtgaggttgcggaagaacttgcaaaaggtgcacgtgctgaaatcgttcaagtaattggaagcacaatcgttttatacaaagaatcaagagaaaataaacaaattaagcttcctcgataaaaagattagcatgcgctatttttatcgctgatgcgtaatgatgtagagagcgaaaccaattgaacttttattaatagcaactctcttcattcctaaccgaggagagttgctgtatataaaaggaaggggcgtttcttttgaggaaaattggcatcattggcggtacatttgatccgcctcactatggacatttgctaattgcaaatgaagtatatcacgctttgaacttggaagaagtatggttcttgccaaaccagattccgccacataaacaagggcggaatattacaagtgtagaaagtcgtttacatatgttagagctcgcgactgaggcagaagaacacttttctatttgtttagaagagctaagtaggaagggcccatcttatacgtatgacactatgttacaattgacgaagaagtatccggatgtgcagtttcactttattattggtggggatatggttgaatatttaccgaagtggtataacattgaagctttacttaatcttgtaacgtttgttggagttgcaagacctgggtatacattgcatacaccatataagattactacagtggaaattccggaatttgcagtttcttcatccttattacgtgagagatataaagagaagaaaacgtgtaaatatttacttcctgaaaaagtacaggtatatatcgagaggaatgggttgtatgaatcgtgagaatgcactgcatattgtcaaacaacaaatgcatgaaaaacgttatatacacacaattggtgtaatggagacagcgattgagcttgctaagttatacggtgtggacgagaaaaaagcagagatggcagctatattccatgattatgcgaaatgtagagcaatttcagaaatggaagagattattaaacgtgaagatttgccgaaagatttactttgctataacaaagagttatggcatgcacctgttggggcatacttagtagaaaaagaagtaggcattacggattctgaaattttgcaagctattacatatcatacaagtggtcatgagaatatgacgatgttagataaagtgatttatgtagctgattacattgaacctgggcgaaagtttccagaagtggaagaggctcgtaaactcgcatatacggatataaatcaagccctattatttgcgttaaagagaacaattcaatttttaatggaaaaagatcagacgatttatccattaacattccaaacatacaatgcagttatcaaggaggaaatgagtaaatgaacgataaagaattattagtattagcggcaaaagcagctgatgataagagagcagaagatatggttgtcctaaatatgcaaggtatttcaccaattgcagattatttcattatttgtcacggaaattcagataaacaagtgcaagcaattgcacgtgaaattaaatcaaaagcacatgagttccaaatcgacgtacaacgtatggaagggtttgacgaagcacgttgggtattagttgatcttggagatgtagttgctcatgtattccataaagatgagcgtaatcactataatttagagcgtctatggggtgatgtgccacgtgaagatattacagaagagttaggccaatgaaatacgaacaatttgcattgttgtacgacgaactaatgaatgatgtcccttatgataaatgggtggaatttacagagggaagtttacagcaggcaggtatgaaagaggcaaaaattcttgatgtagcatgcggtacaggtaatgtaaccctgccgcttgtgcaaaagggttacgatttaataggtgtcgatctttcagaagaaatgttaacagtcgctcagcaaaaactaggcggagaagggcattttattcctttttaccaacaagatatgcgcgagcttgatgttccgggtgagtttgactgtgtaacgattttttgtgattcattaaattatgtattgcaagaagatggagtacaagaaacatttagaagagtatttcaccatttacgtcaagatggtttgtttttatttgatgtacactctttatataaaatacatcatgtatttcaaaatgaaacgtatacagtgaatggagaagaaatatctcttatttggaattgcttccctggtgaagaatcaaatagtgtagagcatgatttaacattctttgttcaagatccagaagaagatgtgtaccatcggtttgacgaatgtcacgtgcaacgtgcatatcaagtggaagagttaacgaaatggcttgaagaagcaggttttacagtgcttcgtgtaacaggtgattttgagcgacttgaagttacagaacaaacagagcgtattttcttcatggcgaagaaaaacggataaaaacaaaagcaaccgagaaggttgcttttgttttataaagaagatgtatttttagttctagcataatctaaagatcgtatgcgtaaagtgtgggaatagtagttgaagtgaaaatgtattgtaaaaaagtaagtatttataaaaaggatttggaatgaaaatgacgtatttattatgtgtgtttattgaattgctgatcaacgcattctaaatcttcatcaaatttttcatgtgttcgctcgattaacttatggaacatatctccaacgtgttcttctaaaacccgaatgccttccccagtaacgccgcctttcacgcaaaccttttcttgtaaggtaggtaatgtgaagatttctttttcaagtaatttccccatccccacgaccatttcacttactaaagtagtagcctcttcgtgtgtaatatttgttttatctacagcagcgttaatgaagcattgtagtaaataactaaagaaagcaggaccgcaacttgctatatcagatgaaacgcgcgttatatcttcttttattacaagaggtgtagaaatgtttttgaatagacgaagtagtttttgttgccattcttcagagcaattatctccaaatgtaaatagtgaggcgccagagagagcgcgatttgtgatacttggaatgatacgcgcgacgtggcaaggtacgagagtctctaattgtgatggagatattggacttgtaatagaaactaagcacgtttcatcagaaaaatgttcagcgtatttttttaggatagggtatatatctatcggcttaacacaaataaaaataagttgtgattgttcgattacttccgggattgtttttgctatctgaacagaagggtatttttcttttatatgatatgcttttgcgggcgtccgattaatgattgtaaggcaagaaggtttgacagcacgggtttctaaaaatgcatcgattagtatatttcccatgtttcctgtccctataattcctatgttcaaagtttcatccctccttcgtaacagctttctcctaaacaatatgaatgatgttataaatttatgattagaggtgtaaaatgatgtgggattttccgaaaaagtggttaggtttagtagctattattggaactttactttttcttgttttttggaaaacgaatcagaatgtagaacgaacgcctattacaatgaatgtacaagagaaggagatagaaaaaaagggtaaaccgaaaatatcggatacaaaggaacagaaaagaacaattataattgatgtgaaaggagcggttagtaaagaaggggtatatgaaatgaaggaaggagatcgcgtaaaggatgcggttcaaaaggctggtggttttttatcagaagtagatatgaaaaaagtaaatttagcacaaattgtacaagatcaaatgcttctttatataccgagtaaaaatgagtcagaacaaggggtgcttacttcttctaaggaagatggcaagattcgaataaatacagcggcgaaagaacaactagaaaaaattacagggattggctctcgaaaggcagaaagtattttgaaatatcgagaagaacatggtccgtttcagaaaatagaagatttattagagattgatgggattggtgcgaagtctcttgaaaagataaaaggtcaaattattattccgtaaaagattgacgaagtttttcttctttcgctacactacaagtagacaaaaaagtaggtgaaaaatatggaacgaatttcatgggatcaatattttatgacgcaaagccatctactatctttgcgtagtacatgtacaaggcttgcggtaggagcgacaatcgttcgcgataaacgaattattgctggtgggtataatggttcaattaaaggtggcgtacattgtatagatgatggttgttacgtaatcgataatcattgtgttcggacaattcatgccgaaatgaatgctttattacaatgtgccaagtttggtgcgaaaacagaggaagcagaaatttacgttacgcatttcccttgtttacaatgttgtaaggcaattattcaaagtggtattacagcggtttattatgcgcaggattataaaaatcatccatacgccatagagttatttgaacaagcgaacgtaacagtgaagcacgttccgctagaatatgatattgctgcattagaggagcaaaaacgttatacagagttgaaagaattatttgcgtctttagaaaaagataatttatcaatggaagaattacagcatgtattcacgaaagcaaaaatgatgctataaggagtgagtataagttgcaggaacaatgggggtatgttgcaatctcatttataataggggttgcaattgccttttcctcgtcacttttattgatagttttttgcctctttttaaatgttttcttctgtttatatcgcacttcgcgtaaaaccttcattttttgtattgtagcgtgctttaatagcgccatatacacttcctatgttcaaacgtggaataagcctctaggggagtcctatggagttacaagaggggttatacaaaatgcaccgcttgttaatggggatcgcctatcttttcaatttgaagatcagaataaaaatatagtgcagttaagttatagaatcaaatcagtcttggaaaagaaaaaaatgcaacaattatacgcagggatatcatgtgtattcgagggtgagaggaaagaaccggaaacagctcggaattttcatggttttaattaccgtgattatttatacaaacaacatattcatttcacatttgaggctacatatatttctgaatgctataaaacatcactgtcgctcacgcaatggattcttcttttgaggcaacaagtaatctcgaaagttacagaaatgtttccagagcaatcaggtgcttttatgaatgcattactatttggtgatagacaacaaatgacgtttgaagtggaagagcaatatcaacaatttggtcttgtacatttgttagcaatttcaggttcgcacattgtactgttaatggtgatagtatattttattttgctaagaagcggtgtgacaagggaggtagcaacaatttgccttatcgtttgtattcctttgtatatggttttagcaggggcgtcaccctctgttataagagcttctataacaggagttttgatgttaattgcttttatgtgctcgattcgtttatctagtttagatgctttaagtgtaacagctatatgcatgcttatatatgacccttatcttgtttttaatattggatttcagttttcttttgtaggtagcttcgctttacttttgtctgctccgttattgttagagagtagcaacggagtaatccgaaattctatttatatttctatcatttcacagctcgttagtactccgattttgttataccactttggttatttttctccatatagcattctcctcaatctcttatacgttccgtttttatctatcattgtattaccatgtagcattattattttactgtgtatgccaattgtcccgtttctcgcaaaaggatttgccgatgtattatcaataggcttgagtatgtctaatgattttctaagttattgtgaaagtttaccatttacccagcttatcttcggggaaacgcccttcaatcttgtagctgtatattgcgccagtattgtcagcatattgatggtttgggaacggagagcgccgaaaaaaatagtttgtatagttgcgagtgtatttctttttattagcacatgtcattatatatatccatattttagaggcggcggaagtgtaacatttattgatgttggacaaggtgatgcaatattaattcgccttccgtatgataaagggatttatcttattgatacaggtggaacgcttcgtgtgaataaggaagaatggcaacaaaaaaagcatgaattttctgttggaaaggatgttttaataccctttttacaaaaagaaggtattaaaacaattgataaattaatcgtaacgcatggagatgcagatcatataggtgctgcgcaagaattattatcatatatacctgtaaaagaagtggtatttggccgaaagggaaaagatgcagtattagaaaaagtagtaaagaaacaggcattagaaaaggaaatgaaaataactgaagtgggggaaggggagagttggagtgtaaatgaagcggaatttttcgttttagctccaaaaggaaaagaaaaaagcgaaaataacgcttcaattgtaatatgggcaaaatttggagggttgaagtggctatttacaggcgatttggaagaagaaggggaaaagattttagtagaggcatatccagatttacaagtggatgttttaaaagttgctcatcatgggagtaatacgtcatctatagagccttttttgaacgtcatacagcctcgtgtagcgattatatctgttggtaagcagaataggtatggacacccgcataaagaagtgatagagcgttttgagaagatggggagtgcgatatggcgcacggacaagcaaggtgctatttcctatgtttttaaaggggaaaatggaacctttaaaagtaaaatcacatatgataaaacacataatagatgaaaaagagaagactgccatgaagtggcagtctttaagaaccgataaatttaataacagttgcaatgatgaaaagtgttgcgaaaaaaccaaatgagacgataaatcctacccctgaatcaatagcgtcattgcgtttactttgaacgttttgttcaaaatcattcatttagaatccctccccaacattccactttagtataaaatattgtcagaaaaaaatctacaatttccatatgaagagaaaacgagcttttttgttacttgtaaatcatgaagtaatgtgagtttttcgtttccaagcatgttaacagttggcacttatactcaaatttttattgcgaataataaagggaaggtgattaccgcacaccaataagaaacccggggcttattgcgtggcgtttaatataaataaagggacgggttataaagcctgttcctttgtacttgtaaaacaaaagctagggcattagtataaatatatattgccaagttagggagtaggaaaaagtatgagtgatatacataaaaaaattaaaaagaaacagtttgctccgttatatttaatatatggaacggaagctttttttataaatgaaacgataaagcttattacgacagaagcacttgaagaagaagatcgagagtttaatgttgtgacatacgatttagaagaagcgtatttagaagatgtggttgaggatgcgcgtacgcttcctttcttcggagaacggaaagtactgttaataaaatcaccgctatttttgacttcgcaaaaagaaaagttagagcaaaatataaaaattttagaagaatacattggtgaaccttctccattttctattcttgtttttgttgcgccttacgaaaaacttgatgagcgaaaaaaaattacaaaactattaaagaaaacagcagatgtagtagaagcgaatgcgatgcaagtacaggatgttcagaagtggattgttgctcgtgcagatgaagtgcatgtgcatattgataacgcggctgttagtttgttgctagagcttgtgggaagtaatgtaacgatgttggcgaaggaaatggacaagttaacgttatacgttggtatgggcggagagattacgacgaaacttgttgcagagcttgtgccaaaatcagttgagcaaaatgtatttgctttgacagaaaaagtggtgaaaaaagatattgcaggtgcaatgcaaattttggatggattatttacgcagcaggaagagccgattaaattgcttgcgttattagtgagtcaattccgcttgttgtatcaagtgaaagagctacagcaacgtggttatggacaaaatcaaattgcgtctcatattggtgtacatccgtatcgtgtaaagttagcaatgaatcaaacgaagtttttctcttttgaagaattaaaaaaagtgattatagaattagcggaagctgattatagtatgaagacgggaaagatggataagaagcttgtgctcgaatttttcttaatgcgattaaatcatatgtgatgacacaaaaaagttcatgcacttagtgcatgaacttttttgtatataaaaaaacgatccaaatggatcgttttttaaacgccttacgcgtttacttgtttcgctaagcgagatttttgacgagctgcagcgttttggtggataagacctttacgagctgctttgtcaagttttttagaagcagttttgaaagcttctttagcattttcaagatcgttattagtaactaaagcttctacagttttaacagcagaacgcatgtcagacttgatagaagcgttatgtgcacgacgctcttcgctaagtttagcgcgtttgatagcagatttgatgtttgccatacttttcacctccctggtgcaatcgaatgactcgattcttacatagaacaagtgatattctatcaaacggtgaagagaattgcaatagtatatccatgaaatttcacgtaaaggaaagaatgaccttatataactttgggaaatctaacgatatttactatgaattacggaggagatacgatgaaagaaccattagatttaagtaaatatagcattagaactgaccttgctgtagaagctcatcaaatgttgcaagaaagccaagaagaacaaaaagggatacagggagttattgtaaaagagagagaagaagaaggtactataattacaaaagtaacgattgatgaagctgcctctgaagcgatggggaaaaaacctggaaattatttaacacttgaagtacaagggatacgtcagcaagatacagaacttcaacaaaaagtggagcgtatttttgcaaaagaattttcttgtttcttagaagaggttggagttacaaaagaagcaagctgtttaattgtaggtcttgggaattggaatgtaacaccagatgctcttggaccgatagttgtagaaaatgtattagtaacgagacatttgtttcaattgcagcctgaaagtgtagaagaaggatttaggcctgttagtgcaattcggccgggggtaatggggattacaggaatcgaaacgagcgatgttatttatggaattattgagaagacgaacccggactttgtaattgcaattgatgcattagctgctcgttctattgaacgagtaaatagcacgatacaaatttctgatactggaatccatcctggatcaggggttgggaataaacgtaaagaactaagtaaagacacattaggtatccctgttatcgcaattggtgttccgactgtggtcgatgctgtttcgattacaagtgatacgattgattttattttgaaacattttggtcgagagatgaaagaaggaaataaaccttcacgatctttgttaccagcgggattttcatttggagaaaagaaaaaattaacagaagaagatatgccggatgaaaagagcagaaatatgtttttaggtgctgttggtacattggaagaagaagaaaaaagaaggctgatttatgaagtgctatctcctcttggtcataatttaatggtaaccccaaaagaagtagatacttttattgaggatatggcgaatgtaatagcgagtggtttaaatgcagcgctacatcatcaaattgatcaagataatacgggagcatatacacattgaggggaacagatgattatggtttgagtcgctttgcgcttttgtgtatatgtagtgtagctttatgtttacttatgatgatagcaggagtggcacttgctaatcatggtttgaaaagtatgaaaggctatcagcaattgtcatatgaacaaatagctcatatgacagggacagaaagtacaggtgctgaatcagaaattttgggtagctcgttttcggcctcagaaaaacaacagcaattagaacgtttaagaagttttaatgttgtagaaggaattgggatggcggtagcaagtgtagcttatgaaatgacgaagttcgggacggatatagttgttgggaaaataaaaggaatttttagctaagagtaacatgggaggcggttgttttactgatttgtaggacagccgttttaaaatttgaaaagggtttgtctcttatggtttattcgcataagatatagatagaatgatttgtatcgtaagcagcacgagttttcattgaatctttgttgctctattgatataatcagtgctagtgtatattggcgagactattaggagttgagaacatagatgaataaagaagaaagagcaaaaagacagtccaaaattcgtaatttctctattattgctcatattgaccacggaaaatcaacgttagcagaccgtattttagagaaaacaaacgcgttaacacaacgcgaaatgaaagctcagttgcttgactctatggatttagagcgtgagcgtggtattacaatcaaattaaacgcagtacaattaaactataaagcaaaagatggtgaagagtatattcttcatttaattgatacaccaggacatgtcgactttacgtacgaagtatctcgtagtttagcggcttgtgaaggcgcgattcttgtagtagatgcagcgcaaggtattgaagcgcaaacgttagcaaacgtatacttagcgcttgataacaatttagaaattttaccagttattaataaaatcgacttaccaagtgcggatccagaacgtgtacgtcaagaggtagaagatgtaattggtttagatgcatcagaagcggtacttgcttctgcgaaagctggaattggtattgaagaaattttagaacaaattgttgaaaaagtaccagctccgtcgggtgattcagaagagccattacaatgtatgattttcgactctttatatgatccgtaccgcggtgtaattgcttatatccgtgttgtaaatggaacagtaaaagttggcgataaagtacgtatgatggcaacgggtaaagaatttgaagtaacagaagtaggtgtatttacaccgaaaactacgcaacgtgacgagttaacagtaggtgatgtaggtttcttagcagcatcgattaaaaatgttggtgacacacgtgttggtgatacgattacacatgcgaaacgtccagctgcagagccgttagcaggttaccgtaagttaaatccgatggtattctgtggtctgtatccaattgactctgctcgttataacgatttacgtgatgcattagaaaaattagagttaaacgattctgctcttgagtttgaaccagaaacatctcaagcgctaggatttggtttccgttgtggtttcttagggcttcttcacatggaaatcattcaagaacgtattgaacgtgaatttaagattgacttaattacaacagcgccaagcgttatttataaagtttatttaactaacggtgaagatgttattgttgataacccatctaatatgccagatccacagtctatcgatcgtgtagaagagccgtttgtgaaggcttcaattatggttccgaatgactatgttggagctgtaatggagatttgccaaggtaaacgtggaacgtttattgatatgcaatatttagatgaaacgcgtgttacattaacatatgaaatcccgttatcagaaatcgtatatgacttcttcgatcaattgaaatcaaatacgaaagggtatgcatcatttgattacgagttaattggctataaaccatctaaacttgtgaaaatggatattcttttaaataatgaacaagtggatgctttatcatttatcgtacaccgtgattcagcgtatgaccgtggtaaagtaatcgtagagaaattaaaagaattaattccgagacaacagtttgaagtgccaattcaggcgactatcggaaataaagttgtagcacgttctacaattaaagcgatgcgtaaaaacgtacttgcaaaatgttacggcggtgacatttctcgtaagcgtaaacttcttgataagcaaaaagaaggtaaaaaacgtatgaagtctgttggttctgtagaagtaccgcaagaggcatttatggctgtactgaaaatggatgacaactaatatttgaaataaaaaagaagtcgtttgtgcggcttcttttttctgtataattactttttagacatctgagcagctctcatttacaataatgagagagctttttagttcatatagagttaggagattgttaatgtccgaaaatattcgaaaagatattcaagataaaatacaaaatggtaattttaattgtgaaaaggaattgacgctttctattattagtggaaagtggaaagttgtgatactgtggcatcttggtgtggaaggaccacatcgtttcagtgaattacaacggttattcccaagcatttctcataaagttttgtcgaaccaattaaaagagttaatggaagatggaattgttgatcggacagtatatcccgaaattcctcctcgcgttgagtattatatgacggaactaggcatgtcacttttaccgatcgttgaaatgatgtatgattggggaaaaatgcgaatggaacaaattcgtaatacgttagagaagtagagaaccctccggagtgcggaggttttctttttagaaaggtaggagttatatttggtacaagctgcatatattcatattccgttttgtcagcacatttgtcactattgtgattttaataaagtgtttattgaacgccaaccggttgatcaatatttagattatttagagaaggaaataataaatacggttcaaaaaattccgtttgatagtataaaaacgatttttgtgggcgggggaactccgacagcgttaaatatggaacagacaaaaaaattactcgagattattaatcgtcatttgcgtccgttcgccccaaattgtgaattaacatttgaagcgaatccaggagatctgccgaaagagaagttgaatgtactgctagaaggtggagtgaatcgaattagttttggtgtgcaaacgttccgtgatgaactgcttgagaaaatcgggcgcaagcatacgagggaagatgcattcctcgcgattcgagaagcgcaggaagtaggatttaaaaatattaatgtagatattatttatgctttgccaggacagacgatagaagatgtaaaagaaacattagatattgcttttacgcttggtgtacaacatttctctgcatattcattaattgtagaacctaaaacagtgttttataacttaatgaacaaagggaaattgcgtcttccgggtgaagaccatgaagcgaaaatgtatgaaatagtaatggatgaaatggagaaacacggttataaccagtatgaaattagtaatttctcaaaaggtgacaataaaagtagacataatctcacatactggaataatgaagagtattatggatttggagctggagctcatagttatgtgaacggggaacgtattcaaaatgtaggtccgctgaagcaatattttaataaaattgatgaaacaggatttccgtatttagatgttcacaaagtgacggagaaagaaagaatggaagaagagctgttcttagggcttcgaaaaacaaaaggtgtttctaaaacggcgttccgcaataaatttaatatagagatggatcaagttttcgcgaagcagttacaaagcaaccaagagcagggattgcttgaagaggaagatggacatgtgcgtttaacgcgaaaaggaaaattattagggaatgaagtattccaatcatttttgattgactaattaaatgttccataggcgtgaaaaagtttcattatttcgtgacgtttccgttgacaattgaatgtcaattttggtaagttattaatagatttagcactcaaagacaaagagtgctaacagaggtgatgatgagatgcttacggaacgtcagctcttaattttacaaacaattattgatgactttattggatcagcgcagcccgttgggtctagaacgttggctaaaaaagatgaaattacatttagttcagctactattcgaaatgaaatggcggacttagaagaattaggttttattgaaaaaacgcacagttcttctggacgtgttccttctgagaaaggctaccgattttatgtagaccatcttttagcaccgcaaaacttaccgaacgctgaaattgtacaaattaaagatttatttgctgaaagaatttttgaagcggaaaaaattgcacaacaatctgctcaaattttatcagaacttacgaattatacggccattgttcttggaccgaagttaagtacaaataaacttaaaaatgtacaaattgtgccgcttgatcgtcaaactgctgtcgctattattgtaaccgatacagggcatgtacaaagtaaaacgattaccgttccggaatctgttgatttatcagatttagaaaaaatggttaatattttaaatgaaaagctatctggcgtaccgatggaagaacttcataataaaatctttaaggagattgttacagttttacgtgggtatgttcataattacgatagtgcaataaaaatgttggatggtacatttcaagttccgttatcggaaaagatatactttggaggaaaagcaaatatgctttcgcagccagagttccatgacattcaaaaggttagatctttacttaccatgattgataatgaagccgaattttatgacattttgcgtcataaacaagtcgggattcaagtgaaaattggtagggaaaactcttcgacggctatggaggattgtagtttaatttctgcaacatattcgatcggcgaagagcaacttggaacaattgctattttaggtcctacgagaatgcaatattctcgtgtaattagtttgttacagttatttacgagacaatttactgatggacttaaaaagtaaatgagagtaatacattcgctcaagtgatgaaattttcattgctgtgtgtaatatataatgcttaggtaatcatgctatgcatgatacctaataccttttaaggaggtgaatattgtggaagagcgtaacgaacaagtggtagaagaagtaaaagaagcgcaagttgaagaagctgtcacaccagaaaacagtgaagaaactgtagaagaaaaaagtgaggctgctcttttacaagaaaaagtagatgagctacaagcgaaactaacggaaacggaaggtcgcacattacgtctacaagctgattttgaaaattataagcgccgtgtccaaatggataaacaggctgctgaaaaatatagagcacaaagtctagtttcagacatcttgccagctcttgataattttgaaagagcaatgcaagtggaagcgactgatgagcaaacgaaatccttgttacaaggtatggaaatggtgcatcgtcaattgttagaagcgctgactaaagaaggtgtggaagtgattgaagctgttggtaaacagtttgatcctaatgaacaccaagctattatgcaagtggaagatagtgaatttgaatcaaacgcggttgtggaagaattccaaaaaggttataaactaaaagaccgtgtgattcgcccatcaatggtaaaagtaaatcaataatttacataaaactaggaggattcgccatgagtaaaattatcggtattgacttaggtacaacaaactcttgtgtagctgttatggaaggtggagaaccaaaggttatcccaaatccagaaggaaaccgtacaacaccttctgttgtagctttcaaaaatgaagaacgtcaagttggggaagttgcaaagcgccaagcaattacaaacccaaatacaatcatgtctgttaaacgtcatatgggtacagactacaaagtagaagttgaaggtaaagattatacacctcaagaaatttctgcaatcattttacaaaacttaaaagcttctgctgaagcatacttaggtgaaacagtaacgaaagctgttattacagtacctgcatacttcaacgatgcagagcgtcaagcaacgaaagatgctggtcgtattgctggtttagaagttgagcgtatcattaacgagccaacagcagcagcacttgcttacggtttagaaaaacaagacgaagaacaaaaaatcttagtatatgacttaggtggcggtacatttgacgtatctatccttgagttagcagacggcacattcgaagttatttcaactgctggtgacaaccgtcttggtggcgatgactttgaccaagttatcatcgatcacttagtagctgagttcaaaaaagaaaataacattgatttaagccaagataaaatggcgcttcaacgcttgaaagatgcagctgaaaaagcgaaaaaagatctttctggtgtaacacaaactcaaatttcattaccattcattagtgctggagctgctggtccattacacttagaattaacgttaacaagagcgaaattcgaagagctttcagcaggtcttgttgaaagaacattagagccaactcgtcgtgcattaaaagacgctggttttgctccaagcgaattagataaagttattcttgttggtggatctactcgtatcccagctgtacaagaagctattaaacgtgaaactggtaaagagccatataaaggtgtaaaccctgatgaagttgtagcattaggtgctgcagttcaaggtggcgtacttactggtgatgtagaaggcgttctattattagacgtaactccactttctttaggtattgaaactatgggtggcgtgttcacgaaattaatcgagcgtaacactacaattccaacaagtaagtcacaagtattctcgacagctgctgataatcaaccagcagtagacattcacgtattacaaggtgagcgtccaatgtcggctgacaacaaaacgttaggtcgtttccaattaactgaccttccaccagcaccacgtggtattccacaaatcgaagtaacattcgatattgatgcgaacggtatcgttaacgtacgtgcgaaagacttaggaacaagcaaagagcaagctattacaatccaatcttcttcaggtctttctgatgaagaagtagaacgtatggtacaagaagcggaagcaaatgctgacgctgaccaaaaacgtaaggaagaagttgaacttcgtaacgaagctgaccaacttgtattccaaacagacaaagttgtaaaagatttagaaggtaaagtagatgcagctgaagttgcaaaagcaacagaagcgaaagaagcattacaagctgcaattgagaaaaacgagcttgaagaaattcgtgcgaaaaaagatgctttacaagaaatcgtacaacaattaactgttaaattatacgagcaggctcaagcagctgctggtcaagcagaaggtgcgcaaggtgcacaagatgctggcgcaaagaaagacaatgtagttgacgctgagtttgaagaagtaaaagaagacaagtaattcaattgtaaacataataagtaagatgacaaaaagtcaaagtcaagcgtgccttgactttggcttttttcacgaatgagaagcgatgtgtgaggatcttaagtttttcgctttgcatactgtaagtgaggaaactttgttgcaaagcactttctttcggtgttaaaattacgtttatgtgaaagattcgggggttgtaaatttatgagtaaacgagactattatgaggtccttggacttagcaagggcgcttcaacagatgaaattaaaaaagcgtatcgtcgtttggctaaaaaataccatccagacgtaagcaaagaagaaaatgcaattgaaaagtttaaagaagtacaagaagcatacgaagtgttaagtgatgatcaaaagcgtgcacagtacgatcaatttggtcatgctggtgcaaatcaaggattcggtggatttggcggcggaggagacttcggcggtggcttcggttttgaagatatatttagttctttctttggcggtggcggcggcagacgtcgtgatccaaatgctccgcgccaaggtgctgacttacaatatcaagtcactttagattttgaagaagctatttttggtaaggaattaaatgtggaaattccagtagaagatccatgtgatacttgtaaaggtagtggagcaaaaccaggaacttcaaaagaaacatgtaaacattgttcaggctctggtcaagtgagtgtagaacaaaacacaccgtttggtcgtatcgtaaatcgtcaagcttgtggtcattgttcaggaactggacaaattattaaagaaaaatgtacgacatgtcacggttcaggtaaagttcgtaaacgtaaaaaaatcaatgttaaaattccagcgggtatcgataatggtcaacaaattcgtgtgtctggaaaaggtgaagccggcgtaaatggcggaccagcaggagacttatatgttgtcgttcatgtaagaagtcatgaattcttcgagcgtgaaggagatcacattatttgcgaaatgccattaacatttgcgcaaatggcgcttggtgatgaagtggaagttcctactgttcatggtaaagtgaagctgaagattccagcaggaacacaaactggaacagaattccgcttaaaaggaaaaggtgctccgaacgtacgtggatacggccaaggagatcaatatgtagtcgttcgtgttgttgtaccgacgaaattgacttcgcagcaaaaagatttattacgtgaatttgcaggacaagaagagcaggatgatagtttattcggaaagcttaaacgtgctttcaaaggggaataatggaaataaaaaatggagttggtaaattgtgaaatggtcagaaattagtattcttacaacagaagaagcagtagaagctgtctctcatattttacatgaagctggtgctagtggagttgcgattgaggatccagcggagttaacgaaagagcgcgagcaacaatatggtgaaatttatgcattgaacccagatgaatatccggcggaaggtgtattaataaaagcgtatttcccgcaaacggattctttacatgaaacgattgcaggtgtaaaatcatctattgatgtgcttccatcttacgacatcgaaattggtactggaaatattaccgttaacgaagtcaatgaagaagattgggctactgcttggaaaaaatattaccatccagtacaaatttctgatacattcacaatcgtaccgacttgggaagaatatacaccatcttctcctgatgaaaaaatcattgaattagacccgggtatggcgtttggtacaggaactcatccaacaacaacgatgtgtatccgtgctttagaaaaaacagtacagccaggtgacactattattgatgtaggaacaggttctggtgtacttagtattgcggctgcaaaattaggtgcgtcttctgttcaagcatatgatttagatccggttgcggttgaaagtgcagaaatgaatgtacgtttaaataaaacagatgatatcgtgtctgttggacaaaatagtcttttagaaggcattgaaggtcctgttgatttaatcgtagctaacttattagcagaaattattctattattccctgaagatgcagcaagagttgtgaagtcaggtggattatttattacatcgggcattattgctgcgaaggaaaaagtaatttctgaggcgttagaacaagctggatttacaattgaagaagtgttacgaatggaagattgggtagcaattattgcacgaaatgcgtaatatagattttagtctataatgaaaagggggagtctctcactataaggtgagagacttgccgtttgttatatgaaaaatgataacgtttcgttcttttcgtaagtgttgacttacgaaaggaacgaaactctactaaggtgattatatgcaacgttattttgtagaagagaaatatgtaaatgagacaagtattcgcattgtaggtgatgacgtacatcatatcgcaagagtgatgcgtatgtcagctggtgatcatatttattgctgtgtaaacggaaaaacagcagtatgttcaattgatgaaattaccagtgaatttattaatacggctattgtagaatgggtagaggcgtcaagtgaacttcctgttttcgtgacgattgcaagtggactgccaaaaggagacaagctagagttaatttttcaaaaaggaactgagcttggggcagctgcattcttaccatttcaagcatctcgctctatcgtaaaatgggatgcgaaaaaagctgataaaaaagttgagcgtttaagaaaaattgtgaaagaagctgcggaacaatcacatagaagtgaaattccagaagtacatgctccggcatcatttaagcaattgctttcaatgagtggtgagtatgatgtttgtcttgttgcttacgaagaggaagcaaaacaaggtgagaaatctaattttgcgaaagctttaacgacaatgaaaccaggtcaaaagctattgattgtatttggcccagaaggcggtttagctgaggaagagattacagcgcttcgtgaacataaatttgtaccatgtagtttaggaccaagaattttaagaacagaaacggcgccgttatacgcgttaagtgctgcttcgtatcattttgaattgatggggtgatgatcaatgtcaactgttgcgttccatacgttaggttgtaaagtaaaccactatgaaacagaagccatttggcaattgtttaaacaaggtggttatgaaagaacagaatatgaaaagaaagctgatgtatatgttattaacacatgtacagtaacgaatactggggacaaaaaaagccgtcaagtaatcagacgtgctgtgcgtcaaaatccagatgcagttatttgcgtaacgggatgttatgcacaaacatctccagctgaaattatggcgattccgggtgtagatattgtagttggtacacaggatcgtgaaaagatgttaggttacatcgaagaattccgtaaagagcgtcaaccaattaatgctgtccgtaatattatgaaaacacgtgtgtatgaagaacttgatgtaccttatttcacggatcgtacacgtgcgtctttaaaaatacaagagggttgcaataacttctgtacattctgtatcattccttgggcgcgtggtttaatgcgttctcgtgatggaaaagaagttattaaacaagcacaacaattagtggatgcaggctataaagaaatcgtattaacgggtattcatacaggtggatacggcgaagacataaaagattataacttagctggattacttcgtgatatggaagcggaagtagggggattaaaacgtcttcgtatttcttctattgaagcgagtcaaatttcagatgaagtaattgaagtgttagataaatctgaagtagttgtacgccacttgcatattccgttgcaatctggttctaatactgtattaaaacgtatgcgtcgtaaatatacgatggagttcttccaagagcgtttagatcgtttgaaagaagcgttaccaggccttgcgattacatctgacgtaatcgttggtttcccaggtgaaacagaagaagaattcatggaaacatacaatttcattaaagagaaccgcttctctgagttacatgtgttcccttactcaaaacgtacaggaacacctgcagcacgcatggaagatcaagttcctgaagatgtgaagaatgatcgtgttcatcgtttaattgagctatctaatcaattagcgaaagaatatgcatcagcgtttgaaggtgaagtgcttgaaatcattccagaagagcaatttaaagacggcgaccgtgaagggttatatgtagggtatacagataactacttgaaaattgtatttgaaggatcagaagaattaattggtaagctagtgaaagtgaaaattacgaaagctggttatccatataacgaagcgcaatttgttcgtgttcttgaagatgatgtaaaaaaagaatcagctagcgcataaaaagagcgtgcaaccggaaacggtttgcatgctttctttatttgaagcggttaagtactataaggtggggaggcgtttcatgcatccctgtatgaaaaaagatgaaatgataaaaatatagttgtcttcatcagtaaaggatactagctatttgcataacttttgaaaaggaaatgcttctattcttcttttattctgccaaatagttgacctgaagtgataaaatgtattataatcgtaaaagacatgctgaagaagtgtttctttttgcatgctgaagttagtatgtaagtgtgatgtttcggagggagggaaagagaatgtcaaaaacagtcgttcgtaaaaacgagtctttggaggatgcacttcgccgttttaaaagatcggtttctaaaactggtacacttgctgaagcaagaaagcgcgagttttatgaaaaaccaagtgtaaaacgtaagaagaaatctgaagcggcaagaaagcgtaaattctaagagagggtgtaagttatgagtcttctcggtcgtttaaacgatgatatgaaacaagcgatgaagaataaacaaaaagaaaaattaaccgttattcgtatggttaaggctgctttacaaaatgaaggtattaaactgcaacatactcttactgaagaagaggaaataacagttttagctcgtgaagtaaaacagtataaggactccctccttgaatttaaaaaagctggtcgtgaagaccttgttaataaactgcaaagtgaaattcagattttaagcgcatatttgccagagcaattaactgaagaagaactagttgatgtaatcaagcaagttatttctgaagttggtgcgacttctaaagcagatatgggtaaggtgatgactgctgttatgccgaaagtaaaaggtaaaacagacggatcacttgtgaataagctggttatccagctattagcgtaaaaaaacgtctcatttcgtatgagacgtttttttattgttcttattaaggagaaacgctatattgcttaaaaagggtttctataagtgatagaaacccctctagttaaagtttcaatttattatttccttgtataattccgattctacacctattcttacttccttgactaaaacttctttcgcaaataaaagctaagtaccgaaccttctgaaaatcagattgaagttttatagcttgctcttcagcataatcctcaaaggtaacgaaagagattctaactattttagattttgcatcagttgcataaaatggccggatattactgtcgataatttgttttataacattcgaaatttcttgactaaagccaatttactttcgtatttcctcatttattaattcattttttaatgaaccctaatattttttgaaattcatataacaaccatctataaaatattcttacttacaacgtaacattcagagtggagaaattttctttttttttgattttatccctcattaacgggcagcccgattggtgaggggggattaaagtttcactttatctcatttgtccaataaatgacaactacttattctatggtcagtatgtcacatccagaacgaattgtaacagtttttttcaagtttctaacttctcgctaggctcaatttcttaatgtaacttgtactgatatcctgtaggggcgcatattcttgtattaatacttctattattaaaggtaacatcctctgatccatcattgtcctgacaaatatgatttcatatagcgactgttttaattaacatgatatgaactcttacagaatatagttatgttagtgaagtcgttataacacgataggcacttgtgaagaaatacatatatatgggatgagagggggtctttcgagatgaagaaattagaacaaatgaaaaattggttgacaaaacaagtagacctaccagtggatgtattaatggatctacctcggattactcttgttgggcaaatacatatttatatagaaaatcatcgggggttattagtgttttcagataaagaagtgcgattacttttaaaacacggtcaattattaattaaaggacaatcctttgttattaaaacgattcttccagaagagcttttgctcgaagggataattgagcaagtaacatttttagaaaatgaaaaaaaaggtgattgaagtgaaacttccatttgtgaagtttttcttctttatcctgtaaaagttccgttgatagagactgattacagttttactcggtttcattttagtacgagctattttaatgtttcaaataaaaagtagtatatctacttttagaaaggtagtgaaggtggtaaatgaaaaataaatggtttataaagtggcttggatatgtaaaagtgcgaattgaaggtagaggagcggaacggtttgttaatgaatgtgtacggaggaatttattagtttgggatgttaaaaagatagctgatgaaacgttagttttttgtatgttgttacgcgatgtgaaaaaaataaaaccaatttatagaaaaaatgaatgtaaattatattttattggacgttatggttttcctttttggaataagcgtttaattaaaaatagtggatttttaattggttttttaattttcttttttggtgtgattgcaatgtcaaatatggtttggaaaattgaaattacaggagcaaaacctgaaacggaatatatattgatgaaagaattggataaaatgggtattaaaaaagggaaactacaatttcaaatgccgaatgtagaagatgtacaacgccatttgacagataatattaatgccattacttgggcgggactagaagtaagaggaacgacgtatcattttaaaattgttgaaaaaaacgaaccgaagaaagaaaaggaacaaaggccgcaaaatttagtagcaaaaaaagaagcgattattacaaagacgttcgtagaagttggaaagccggttgtactgaaaaatgatcatgtagaaaaagggcagattctcgtatcaggaatatatggtaatgaggaaagtccgacgattgtttcagcgaaaggtattgtgtatggagaaacgtggtatacatctaaggtggatgtcccgttaaagacgcaattccaagtgtatactggtaatgtatacaatgaacattttcttaaatttggggatacgaaaataaaaatatggggatttcagcatgataagtataaacgctctcgtactgaaagtgtaaaacatgatgtgaaattatttggttttacactgccgattgcatatgaaaaagatgttgtgagagaagaggaagaagcgaatcgagaatatacagaaaagcaagcgctgaaagtagcgaaagagatggccgaaaaagaactaaagaaaaaattggatgaacatgctatgattgtaagtgataagattttgagtaaagaggttgaggcgggtcaactaaaggtcacattgcattatactgtggttgaaaatattgcagagccacaaccaatatccgaatccgatattcaaggagactgagtaatggcagaacaattagtagaaatgaaccaaaaattggaaaatactaacgaagcaatcgctctttttggagtcaatgatgcacatttaaaagtaattgaacgagaactgaatgtatcgatcgtaactagaggagaaactgttcatgtatctggggcagttgaaacggtgacactcgtagaaaaaatcttacagcaattacttgttgtaattcgtaaaagtatatcaatttcagagagagatgttgcgtatgcaattcagcttgcacaacaagggaaaattgctcaatttgaagagttatatgaagaagaaattttcaagactgcaaaaggtaaatccattcgtgtaaaaacaatggggcaaagacgatatattcatgcgatgaagaagaatgatattgtctttgggatagggcctgcaggaactggaaaaacatacttagctgtagtaatggctgtgagggctttaaaacaagggtatgtaaagaaaattattttaacaagacctgctgtagaagctggagaaaatttaggttttttaccaggggatttgaaagagaaggtagatccatacttacgcccattatatgatgccttacatgatattcttggacaagaatatacgcagcgtatgatggagcgaggagtaattgaaatcgcgccgcttgcttatatgagggggcgtacgcttgatgattcatttgttattttagatgaggctcaaaatacaacgggtgctcaaataaaaatgtttttaacaagattaggttttagttctaaaatggttattacaggggatccttcacaagtagacttgccaaaaggggtaaaatcaggactatctatagctgctaatattttatctgatgtatcaggtctgtcatttattacattagaacaaacggacgttgtgagacatccattggtgcaacgtattattgaggcatatgataaaatggaatgatcctatttgtcaggatcatttctttttgtatgataaggttggcgaacgtcatattttttactatcatgaaagataaggaaaataaactataggtactagtgtataaaatgttgcctcaaagtatcgtttggtagaagaaatgaaagctataaatagtttcactttatttctggagaggagaaggtattgaaatcatgtcaagatctcaagaaatttctaagtggtttcgtaatttacaacattcgaaaaaactaagttggatttcttacgttgtattaggagcagtgctgttttttgcgcttatgaataatgtaaaaccagagcaattagatgttaatatgtattctattgcgaaaaagacaatccattctcctataaaaattgaagataaagttacaacggataaaaagaaaaaagaagccgctacaaaagttgaagatcaatatacatataaaagtgagtataaacaaaacaaagttgatattgtgaatgacgtttttgctaaagtggatgaagtggtgcaagagattaaagctgttggaccggatgatcaaaaaaagatgactgatgctgagaaagtggagaagttaaaaaagaaactacccgctgacttaacgaaagaattatctgattcaaacttactaagtttgattaatgcagattcgagccaattagtattagcgaaagatgctgcggtcacagcgattaatagtatcatgactgagcatattaaaatggacgaattgaaagatgcgaaagaacgatatgtaagtgagatgaatagtgttaatgttgataatggtttaaaagagtcaattaaggcgctaggaagatatgcaatttcagcaaactatttttatgacccgatcttaacgaaagagaaaagaaaagcagaggaagatttagttccacctgtttatattcttcaaggacaagttcttgttagagaaggtgaaacaatttcaagtgatgtgtataatcagttgaaattagttggtttgttagaaaaagggaacggctttcaaccttatgttggattagcggtactcattggtgtgttactatactttatgcataaacaatttgaattatttttaaagagaaaaagagaagatagaccgtatgttttagcgtatattacaattttgtctatcacaatcgtcttaatgaaaatcattagtttgtttcaaaaacttgaatacgcggggattgcatatgttgtcccagttgcgatgggaacaatacttgtaaaactaatgattggtgatcgatttgtctttttaacgagtatgattttttctgtatgcggaagtattatgtttaatgaaggagtaacgagtacattaaattatagtgtagggatttacgtattgttaagttcattatcggttagtattttcttgcgagaaaaaaatcgtcgtacaatgattttacaagctggtatactcgtttctgtattaaatgtagtcgtattggcggcgctcttattattacgtaatgggaatttttcgcctcttgaaattggtacgcaattattaatggcttcactttcagggattatatcatccgttttggctatggggattttaccatatttagaaagtggacttggaatcgtatcaagcatgaagcttatggaactatcaagtccaaatcatccgcttttacgcagaattttgttagaagcgccagggacatatcatcatagtgtaatggtagcgaatctttctgaggctgcttgtgaagcagtcggggcaaatggtgtattagcgcgtgtaggggcatattatcatgatgtaggaaaaacagtacaaccgcaattttttattgaaaaccaaatgggaattgaaaacccgcatgataaattagatcctgtaacgagtaaagatattataattgctcacgtaacggatggagtaagaatgctcgaagaatatcatattccacaagaaattattgatatcgctgggcaacatcacggtacaacgttactgaaatatttttattataaagctattaaagaagataaagaaaaatatacagaagagatgttccgttatccaggttcaaaagcaacttcgaaagaatcggcaattgttggtattgctgatagtgtagaagctgcggtacgttctatgaatcacccaacgccagaacaaattaataatttggtgcaaagtattattaaagatcgactacaagacggtcaatttagtgaatgtgatttgacgtttaaggaactacaaatcgttggaaaaacgttgtgtgaaacgttaaatggtattttccattcgcgtattacatatccggaacttccggaagaaaaggagaaagaatgagtttgttaattgattttattgatgaaacagaagaagtaaaagaagcgtatatgagtttaattcgtgaagtgttagaaaaagcagctcaaatggaaaatatcgaggatggtgcggaggtatcggtgacatttgtagataatgagcgcattagagaaattaatcgtgattaccgagataaagatcaacctacagatgtaatatcctttgcgatggaagaaatgggagaaggagaaatggagattgttggtgcagagatgccacgcatgttaggtgatcttattatctctattccaagggcgaaagagcaagctgaagagtacggacattctttcgatcgtgaacttggatttttggcattacatggctttttacatttacttggttatgatcacatgacagaagaagatgaaaaagaaatgttcggaagacaaaaagaaattttagaagcttttggattaggacgatgaaaaaaggaaaacttatagatagttttggatatgctatagctggtatattcttttgttttcgtcatgagcgaaatatgaaaatccattatttagccgcagtcattgttatatgctgcggcttttatttccatattacgagaacagagtggatgatattacttattgtaatagggagtgtaatgagtttagaaatggtaaatacggctgtggaaaaaacagtagatttagcgactgccgatattcatccatttgcaaaaattgcaaaggatgttgcggcaggagcggttttattgtttgcaattatagctgttataattggtgctattatctttttaccgtatatggtatagttgcattccgaagcttttattaagctttggaagtgccgtaaggggctttaatgagagagtgtacctcttcatagctgtgaacaggaaggatgcgggaatatgaatagtaaacaattaattctagaagcaatcgaagcgcgtaaacaagcgtacgtaccatattctaaatttcaagtaggtgcagcactattaacgcgcgatggaaaagtatatcgtggatgtaatgttgagaatgcatcatatggcttatgtaattgtgctgaaagaacagctttatttaaggcggtttctgaaggagataaagaatttgtagccattgcggttgtagcagatacaaagcgcccagtacctccttgtggagcatgtcgacaagttatggtagaattatgtaaacaggatacgaaagtatacttaacaaatttacatggtgacgttcaagagacgacagtcggagaattgttaccaggagcatttttagcggaggatttacatgaatagaaaaggttataaatcaggttttgtctctattattggcagaccgaatgttgggaaatctacatttttaaatcgtattatcggccagaaaattgctattatgagtgataagccacaaacgactcgtaataaaattcaaggtgtatatacagaaaatgatgcacaagttattttcattgatacaccaggaatacataaacctaaacataaactaggcgacttcatggtgaagatggcgcaaacgacattaaaagaagttgatatcgttctgtttatggttaatgctgtcgaaggctttggtcgtggtgaagaattcatcatcgagaagttaaaagaaacgaaacaaccagtatttttagtaattaataaaattgaccaacttcatccagagcaattactagagttaattgatcaatatcgtaaactacatgagtttgcagagattgtaccaatttctgcgttagacggtaataatgtggacgctttaattggaacaattaaaaagtatttaccagaaggaccacaatactatccagataatcaagtaacggatcatccggagagatttattattgcagagcttattcgtgagaaagtactacatttaacacgtgaagaagtgccgcattctgtggctgttgttatcgatgcgattcaaaagcgtgagggcggggcagtttatataaatgcaacgattgttgttgaacgtgcatcacaaaaaggaatcatcatcggaaaacaagggaaaatgttaaaagaagttggtaagcgagctcgttttgatattgaagcgctacttggttctaaagtatttttagaagtatgggtaaaagtgcaaaaagattggcgtaataaaatgtctcagcttcgtgacctaggtttccgcgaggatgagtactaaaatagagtcaagctgtaatcagtggatggttggttcatccactgattattggtttttatgaactttgataaattaggaaaaatttttctcacatgaaaatggacaaaatgggtcaatttaataacaacaaaggaaattggtttataggctacgcttattgagaaaggtggattcttatgctagattttacctggaagtttttctccaaaacaggaagcattgaaacgtacttgcttttgaaagaaatggaaaaagacgtaaacgatgagatggatcaacatgaagaggagctagcgcatctagactctccaatttcttgacccgttttgttcaaaccttggatggtgacgaacatgtttcaaaaagttgagggcatcgttatccgtacgacagattacggagaaacgaacaagattgttacaatattctcaagagaacttggtaaggtaagtgcaatggcaagaggggcaaaaaaaccgaaaagccgattagcatctgtgtcgcaattaatgacacatggccagtttcttattcaaatgggatctgggcttggaacattgcaacaaggcgagattatttcaactatgaaagaaattcgcgaggatatatttttaactgcttatgcatcatttattgttgaattaactgataaagcaacagaagataaaaaacataatccgtatttatttgaaatgttatatcaaacgttgcattatatgtgtgagggtgttgatccagaagtattatcattaatttatcaaacgaaaatgcttccggtattagggatgcgcccgtactttgatacatgtgcgatttgtcatcaagaaacagactttgtcgccttctccgttagggaaggcggttttctgtgctcacgtcatgcggagcaagacccgtatcgtataccggtaggagaagctgttcataaattattacgtcttttcttccatttcgatttacataggctcggaaatgtatcggtaaaggatagcacaaaaaaacaaatgcgtttagtattgaatacatattatgatgaatattgcggaatttatttgaaatcaagacgttttttagaacaacttgataagtttcaaatataattttgggccgtatacggtcctttttacatactttctttttcgaatagcatatttagtatataatatttaagagatagtataacttttttcgttgtgcattaaaggtggtgattatcatagagctgaataaacggcaagaacatatcattcagattgtaaaagatcacggtcctattacaggggaatcaattgcagcgcaattgggtctaacacgtgcgacgctaagaccagacttagcaattttaacgatggctggttatttagaagcacgtccacgcgtaggttatttttatacgggtaaaactggggggcagctattatctgaagctgttaagaaaattaaagtacaagattatcaatctagaccggttgtaattgataaaaatgtttccgtatacgatgcaatttgtacgatgtttttagaggacgttggtacattgttcgttgtagatcagatgactctattagttggtgttgtgtctcgtaaagatttattaagagcgagcttaggaaagcaggatttaacctctcttccggttaatattatcatgacaaggatgccaaacattgcgatgtgtcgtagagaggattctttatatgatattgcgatggaattaatagaaagacagattgatgcaatgccagttgtaaaagatacgaaacaaggtttagaagtgattgggcgaattacaaaaacaaatattacacgtgcgtttgtaaatttagtaaataacgaataagtgtaatttgtttaaagtgaggtaatgtaatggataataaaatcgtatatgtcgtatctgactctgtaggagaaacggctgatttggttgttcgagcagcaatggggcaattcccgtttgctcctgatattagacgtgtaccgtatgtagaagatacagggacattaaaagaagtgatttcgattgctaagagtaatcaagcacttatatgttttacgttagttaagcctgatatgcgcaaatatttagtaacagaggctgcaaaagaaggggtagaggcatacgatattatcggccctcttattgatcaaattgaagaaattacggggcaagtgccgagatatgaaccaggcgttgtccgtaggttagatgaagaatactttaaaaagattgaagcgattgagtttgctgtgaagtatgatgacggcagagatgcacgaggtattttaaaagcggatatcgtgttgattggtgtttcgcgtacatcaaaaacaccactttcccaatatttagctcataataaacgcttgaaagttgcgaatgtaccactcgtgccagaagttgacccacctgaagaactatatcaagtggcaaaagaaaaatgtttcggtttgaaaattacgccagataagttaaatcatattcgaaaagaacgattaaaatcacttggattaagtgatggagcaacatatgcaaatattaatcgtattcaagaagaaattgatcactttgaggaagtaattagtaaaataaattgtcaagtaatcgatgtatcgaataaagcaattgaagaaacagcaaatattattgtgaatgcagtgcaaaaccaaaaaatgttttagcacatttaccaaaggtgaatgtgcttttttcgctcgtgtgaaatatggtacctatggattttgtaatagattgtagtgtaatggttatacttatactcctttgtcttttagtatattcaaggtgtgagtttgtcatcctgaaatgtaagatgaaaaaataaagggatatgtagcgtagttgaagaaaatatattataataaaaaattgtgataaaaacctatattttacgtttagactttaatttttcagaataaactagggataggatttacgaaaaagacatgtaattacgttaaatcgacaaaatctatacaagaaaacgcacattatggaaggattcacagaagggatgtagaatacagaaatatgcaaagcatcaacaacatattagttggtgtagatgtatatcccgtgaaggctgaaattgtgcaagttggagcggaatttcatgtcggaattttgtttgtcgcatcatatgctcatcctttaaggaaatagcaaggcaattggatctttgtagatactgaacaaaatggagttgatcgttatatggatcaacatgaaaaagttacaaatctcaagatcaaacagtatatgtggcttgctactcttcttataaaaaggtgtgtatgtattgtttctaagagatacatttgtaacagatgagcaaatgtatacaattttatatagcaagtatgtatatgcgatttatgcagataaaggacctataggaaaggttcaaaatcgtttatacaatgtaatcggcaacactttctaacaagtttagaaaaatattgtcgaattataaaggaattttttaatttatatcgaatacaaaatacgacacggagatggagttatggggaacagaattcccgaagaagttgttgaacagattcggacatcatccgatattgtagaagtcattggtgaatacgttcaacttagaaaacaggggcgtaactatttcggcctttgtccatttcatggtgagaattctccttcattctctgtttcatctgataagcaaatttttcattgcttcggatgtggagaaggtggaaatgtattttcctttctaatgaaaatggaaggactggcttttaccgaggctgttcaaaagctaggcgaaagaaatggaattgcggttgcagagtatacatcagggcaaggacaacaagaagacatatctgatgacactgtcatcatgcaacaagctcatgaattattgaaaaagtattatcatcatttattagtaaatacggaagagggaaatgaagcactttcatatttattaaaccgtggtattacgaaagagatgattgagaagtttgaaattggttatgcatcacctgcttgggatgcagcgacgaaaattttacaaaaaagaggtttatcgctgtctagtatggaacaagctggccttctaataagaagtgagaaggatggtagtcattatgatcgcttccgtggaagagttatgttcccgatctatacgttacaaggtaaggtgatagcgtttagtggaagggcgttaggagatgacactccgaaatatttaaatagccctgaaacaccgatttttcacaaaagtaaattgttgtataacttccaccaagcaagaccgtttattagaaagcgtgggcaagtggttcttttcgaaggatatgccgatgtactagctgcggtaaaaagtggtgtggaagaagctgttgcgacaatgggaacagctttaactgaagaacaagcaaaacttctgcgacgtaacgttgaaactgttgttctttgctatgatggtgataaagcagggcgagaagcgacgatgaaagcagggcaattattgctaaaagttggttgccaagtgaaagtcacatccttgccagataagcttgatcctgatgaatatgtgcaacaatatgggactactgcttttgaaaatcttgtgaaatcaagtgtgagttttgttggttttaaaataaattatttgcgtttagggaaaaatttgcaagatgagtctggcaaagaagaatatgtgaagagtgttttaaaagagttatcgttgttacaagatgcgatgcaggcagagtcatatttgaagtcattatcgcaagaattttcgtattcaatggaaacacttttgaaccaattgcaccaatatcgcaaagaacaaaaggtacagcaaaaacaaataaagcaggttgctaaaacgtctcaagtcgttcaaacaaaaccgaagttaacaggttttgaaagagcggaaagagaaattatttaccatatgttgcaaagtgcagaagtagctgttcgtatggaatcccatatagaagattttcatacagaagaacataaagggattttatatgaactatacgcatattatgaaaagggaaatgaaccttcagttggaacatttttaagttggctctctgatgaaaagttgaaaaatattatcactgatatttcgacggatgaatttattaatccagaatacacagaagaagtgttgcaaggccatttggagacgcttagacggcatcaggaaaaacttgaaaagatggaaattatctttaaagtgaaacaaatggaaaaaacagatcctgtagaggctgctaaatattatgtagcatatttacaaaatcaaaaagcgagaaaatagcttttttgataaagttttagtataatgaatgtttgtatctcgcgtaaggaggggaacagatggctgacaaaccagctcgttctaaacaaattgaaactgaaatgacccttgagcaagtgaaagaacaactcactgagctcggaaaaaaacgtggcgttcttacatatgaagagattgcagaacgcatgaatggatttgaaattgaatccgatcaaatggatgaatactatgaatatttaggtgaacaaggcattgatttagttggtgataatgacaacgaagaaggccctaataatcgccaaattacaaaaacagaagaagagtttgacctcaatgatttaagtgtaccacctggggttaaaatcaacgatcctgttcgtatgtatttaaaagaaattggtcgtgtagacttactatctgcagaagaagaaattcgacttgcaacgcgtattgaagaaggcgatgaagaagcgaaacgtcgtcttgcagaagcaaacttacgtcttgtagtaagtattgcaaagcgctatgtaggccgtggtatgcttttcttagacttaattcaagaaggtaatatgggtctaattaaagctgttgaaaagttcgattatcgtaaaggtttcaaatttagtacgtatgcaacttggtggattcgccaagctattacacgtgccattgcagaccaagcgcgaacaattcgtattccagttcatatggttgaaacaattaataagttaattcgtgtacaacgtcaattattacaagatttaggtcgcgaaccatctcctgaagagattggtgaggaaatggatcttgctccagaaaaagtacgtgaaatcttaaaaattgcacaggagccagtttctcttgaaacaccaattggtgaagaagatgactcccatttaggtgactttattgaagaccaagaagcaacatcgcctgcggaccatgcagcctatgaattgctaaaagaacaattagaagatgtgttagatacactaacagatcgtgaagaaaatgttctacgtcttcgtttcggtttagatgatggacgaactcgtacgcttgaagaagttgggaaagtattcggcgtaacgagagagcgtattcgtcaaattgaagcaaaagcacttcgcaaattaagacatccaagccgtagtaagcgtcttaaggatttcttagaataggttattttttaagtttacttcacttttgtgaagtaaacttttttattttgttaatttttgttaaaatttagctatgggcaacgattacaatttcttgtaatttattttacagaattgtcttttgatttgcaaatgctcatttttcgatttttcgattaattttgtttattatatacaaaaatatatgtagaaaagcgaaaaatatgatgagaaacgttaataattatcgaaataataagcgatatgacaataaaaaacaataaactgaatttatggaatatttttaacaagtggtagtttgctcttttctgatagagcgttttcaagtacaatataaatgactgaatcatctaactatttaggggtatagaggggggagaagagatatgaaacgtaatccgctgattccgttcgctcttattgcagcattgggtattatcgttatgtttgtattttcatttcaggggctaaataaatctaaagagttagctgatgcaaaaaatggcgggaagccagcacaaacggcatcaaaaccagaagatattgtgaagcaaagctgtacgagctgccatggtgatcagttacaaggggcagttggacctaacttacaaaaaattggtgggaaactttcaaaggatgaaattaaagaaattctttcgaaaggaaaaggcaatatgcctgccaatatagttccagctgatcaagccgctaaagtagctgattggttatcgaagaaaaaataaagttccgtatgacaagccttttgcttatgcaaagggcttgtttttctatattttctaaaatacgatgaatgatagagcggtgaattgttgttatgggcttgcaacaactactgtaaattcattatcatggagacagactgacaagagaaggagtaatggaaatacatgaatgaagtaaagctttcaaaacgattagaagaagttgtacgtgaaataccagtaggatctacagttgctgatattggatcggatcatgcgtatttaccgtgttatacaattataaataatattgctacaaaagcagttgcaggagaggttgtagatggaccatttcgctctgcgcaagcaactgtagctgaaagtggtttacaagataaagtagatgtgcgtaaagggaatggattagctgttatcgcaccaggagaagtagatgtaattacggttgccggaatgggcggagcgttaattcgtgacattttagaaagtggtaaagaaaaattagaaggtgtaacacgtttaattttacagccgaatattgcagcgcatcatattcgtgaatggtttattgagaatggttgggagcttatccatgaaaaaatcgtaaaagaagatgggaaaatttacgaaattttagtaggggagcgcggaaatgttgtagcgccttactctgaaaataaacaagctgaattgtttatgggaccatttttaataacagaaaaaagtgaagccttcgttgaaaaatgggaaggagaattaaaaaacttccaaaatattttaaaacagttagaacgtgcggctgattctgaagaaacaaaagcgaagcgtggggaagtagaagcgaaaatgaaaatgataggggaggttttatcatgagtaaaattccaaacggccatgaaattatttctttatttgaaagtatgtatccgaagcatttggcaatggaaggagataagattggtctgcagattggagcgcttaataaacccgtgcagcacgtattgattgcgctagatgtaacggaagaagttgtggatgaagcaattcaattaggggcaaatgtcattattgctcatcatcctttaatttttaacccgttaaaagcgattcatacagataaggtgtatgggaaaattattgaaaagtgtattaaaaatgatattgcaatctatgcagcgcatacaaatgtggatgttgctaagggcggggtaaacgatttacttgctgaggcgttaggattgcaaaatacagaagttttggcaccgacatatgcagaagaaatgaaaaaagttgttgtgtttgtgccagtcactcatgcagaagaagtaaggaaagcattaggagacgcaggtgctggtcatatcggcaattatagccactgtacgtttagtagcgagggtacaggcacatttgtacctcaagaggggacaaatccttatatcggggaaactggacagttagaacgtgtagaagaagtgcgaatcgaaacgattattccagcttccttacagcggaaagtgattaaagcaatggtaacggcgcacccttatgaagaagtagcgtacgatgtgtatccgcttgataataaaggtgaaacgttaggcctaggaaaaataggatacttacaagaagaaatgacgcttggccaatttgcagaacatgtgaaacaatcattagacgtgaagggcgcaagagttgtcggtaagttagatgataaagtgcgtaaagtagctgtacttggtggagatggtgataaatatataaaccaagcgaaatttaaaggagcagatgtatatgtaactggtgacatgtactatcatgttgctcatgatgcgatgatgctcggtttaaatatagttgacccaggacataatgttgaaaaagtaatgaaacaaggtgtacaaaagcaattacaagaaaaagtggatgcaaagaaactcaatgtacacattcatgcttcgcagttacatacagatccatttatatttgtataagaaaaataaaaaccgttgctcatgtaagcaacggtttttattattgttcttttttcactttcacgcgaggtaatattttttgtaacggtacttttcgaactctttcccatgtagcgggattcattgggtcatattgctctaagaaagcgataacttctttcgtaattggcgttggagtagaagcacctgctgtaacagctacgttttctacaccttgtagccactctaattgaatttcgcttacatcagcaactcgatatgcttttgtacccgcgatttcttgtgatacttgtgctaagcgatttgaattgttacttttcggatcaccaacaacaattgttaagtctgcaacatcagcttgtttagcgacagcttcttggcgaacttgagtagctaaacaaatttctttatggaattctgctgttgggaattttttttgaatgtcctccattaaatgttgaacatcccattgactcatcgttgtttgatttgttactaaaattttatctgttgggatttctaatgtttttaaatcatcggctctttcgataaggtgaacgatgtcaggtgcaataccaactgcgccttctggctctggatgattttttttaccgatataaatgacatgatacccttccgctttcttagcttcgataaggtcatgcgtcttggtaacatctgggcaagtggcatcgattgttgttaaacctttttcttttgcgcgttgtttaacttctggagaaacaccgtgtgctgtgaaaataacagtaccagaatcaattttatctaaaatttctaagcgacttggaccgtctaatgtgatgattccatcttcttcaaaagcgtctgtaacatgtttattgtgaacaatcatacctaaaatataaatgggtctcggcaatgatttatctaatgcagcgttacgtgcaattaccattgcatcgacaacaccgtagcaataaccacgaggggaaattttaacaattttcatatgagtaatcctctccttctaaacaagggatacttttgtgcatagtcttttacattataaaggaggagtggatagaaaacaaaggattgttacacatatagttttggttttgttgctgtttgttgaactggttctttcggtaactctttttctattacaggttcaatcactattttctttcgttttcgtttctttttttgaggtgcaggaggcggactttctacctcaactggctctgttacattttccgtttgattttcttccgtactttttccagaggtgaggattttaacaatgcttggtagactacgcataataggaccatactgttcgacgacaggacctacagattgaacgacttgggatactttttcgatgttgtttatcatattagtaggattcgaaattaagttcgaaaagaaactgccgatgccactgcttgctgttgcggcagctgtagttgcgccgccgcgcgtttcatttgattcatacatttgaggcggtatcatttgctcaggatgttgctgcatgtatggttgatattgtggatgttgctgctgatattgttggtggtattgctgctgatattgctgttgatattgtggcggtggtggttgctgatgcatcatcggttgcccttccatttgtcggtaaggtggaaccatttgcataaaaggctcggttggatcgtgttttttaaaaagcttagcaagaaaacctttctttttttgtgccattggtggtagttgtggaattggatatggtgtataaggttgttgccctggattcggatacatttgccttgtaggggatttcggaaacatgtgagaaatcctcctttcttcagttaggtatatacacatacaatatgcaataaaagggaagaaggttagtttttgaagtgaaaacctaaactaaagatggattttacttgtagatttcgatataatgtagacttgactgatttgtgcgcgcagtagaaattttagaaagaaggtgtaacttatgacacaacaaacttttacacagtatgattttaaaccatttttaatagatgcagttcgtgaactacgctttacagagccgacaggaattcagcagaaaattttcccggtcgtgaaaaaaggtgtaagtgtaattggacaatcccaaacaggttctgggaaaacacatgcatacttacttcctacattaaacagaattaatgcaagtcgtgaagaagtacaacttgttattacagcgcctactcgtgagttagcacaacaaatttacgaagaaatcgtgaaattaacaaagttttgtgcggaagaccaaatgattacagcacgttgtttaattggtggaactgataaacaacgctcaattgaaaagttgaaaaaacaacctcatatcgtagttggaacaccaggacgtattaaagatttagtagaagagcaagcattatttgttcataaagcaaatacgattattgtcgatgaagcagacttaatgcttgatatgggattcattcatgatgtagataaaattgcagcacgcatgcctaaaaacttgcaaatgttagttttctctgcaacaattcctcaaaaactaaaaccgtttctgaagaagtatatggagaatccagagcatattcatatcaatccaaaacaagttgcagctggaaacattgaacactatttagtgccttctaaacatcgtaataaaattgatttagtgcataaaatgctacttcaatttaaaccgtatttagcagttgttttcacgaatacgaaaaagatggcagaccaagttgctgatggattaatggaacgtggcttaaaagttggacgaattcacggggatttatcaccacgtgatcgtaaaaaaatgatgaaacaaattcgtgaccttgaattccaatatattgttgcgactgatttagcagcacgtggtattgatattgaagggattagccatgttattaactatgagctaccatcagatttagatttcttcgttcaccgcgttggaagaacagcacgtgcggggcattctggtattgcagtgacgatatatgatccagcaaacgaagaagcgttagatagtttagaaaaacaacgtcatattgagttcaagcatgtagatttacgcggagatgagtgggccgatttaggtgagcgtcgtcgtcgtaagagccgtaaaaaaccaaatgacgaacttgatgttatggcaacgaaagttattaaaaaaccgaaaaaagtaaaaccaaactataaacgtaaacttgcaacagaacgtgacaaagtgaagaaaaaatatggcaataaaaaaagataaggggtttcccttatcttttttttatcccgctatttgtgggagatgtaatcaatatggatagaaaagtattgattaaagtttcacttaatccagctaatttaaatgaaaagtatagtctgtataaatagtcatataaatttgtgtagtgcatcttttgtgaacaaacaattcactacatatttctacaaattatgctatcattatatctattgtatattgaagaggtgattgtatgttaaagattggatctcatgtttccatgagtggtaagaaaatgttattagcagcaagtgaagaggctgtttcatacggtgcaacaacgtttatgatttatacaggtgcaccgcaaaatacacgaagaaaaccaattgaagaattgaacatagaagcaggaagaaaacatatggagctgaacggaattgaggaaattatcgtccatgcgccgtatattattaatgttgggaatacgacgaagccagaaacattccaattaggcgtagactttcttcgcatggaaattgaaagaacatcggcattaggtgtagcgaaacaaattgttcttcacccaggagcgcacgttggtgctggagcagatgctggtattcaacaaattattaaagggcttaatgaagtattaacgccagaacagacggttaacattgcgttagagacgatggcaggaaaaggaacagaatgcggtcgtagctttgaagaaattgcaaaaattattgatggtgtaaaatataatgaaaagctatctgtatgctttgatacgtgtcatacgcacgatgcaggatatgatattgtaaatgactttgacggcgtattaaacgaatttgataagatcgttggtatagatcgtttacaagtacttcatattaatgatagtaaaaatgtacgcggagcaggaaaagaccgtcatgaaaacattggatttggtcacattgggtataaagcattgcatcacattgtacatcatccacagttaatgcatgtaccaaaaattcttgaaacaccgtatgtaggggaagataaaaaagataagaagccaccatacaaattggaaatcgaaatgctgaaaaacggcacttttgatgaagggcttcttgaaaaaattaaagcgcaataaggagggggaaatcccctccttattttagtagttgctgaaataatgtatttacttgttgggcagtggcaggggaagttacttttgcgatttgttttaagagctctagtcgctcgttgttatcgtaaatattaatatttttacccttcataagtaaaacgatttgatcagcttgtgcggctgtaatgggaacttcatattctttgctatattttaataactcttttgtagaaatatgatttaattttttattaacaatttgtttaatgaggttcatcttattatcctccttcacgcgttcttctatcgaaatatatgagcatatagcttgtacatattcgtatggagtttcttttttcatgaggaaaagaagcgtatgttataatataaggacaaaactacagaaaaagagtaaagggaggacttatggagcaaaagcaacatcgaaaagaaagtgttattcatctcatttatcgtttagttatgattatttttggagcagcatgcgcggcggtagcaattgaactatttttaatgccaaataaaattattgatggtggaattattggtatttctcttatattagattatcttactcctaacatttggtggttaagtttttctactttagtcgttgttctcaatatcccatttatgtattccggttataagcaaattggaaaaacatttatgttatcttcgacatttggtattgtagcattagctttcattgagtcaacgttacatgcggtaccaccatttacaacagaacctattttagcgacagtgtttggtggtcttattttaggtcttggtgtaggacttgtaattcgtcatggtggatcgctagatggaactgaaattatggggattttattaacgaagaaattaccgttctctgttggtgaattcgtaatgtttgtgaacttatttatttttgcatgggcagcatttgtgtttggtgtggaacaagcgatgtattctgttatgacgtactatatcgcatttaaaacgatcgatacagtaattcaagggctagatgaaacgaaggcggttttaattgtatctgatcaatatgaggaagtatcaaacgcgattttgcatcgtcttggccgtggaactacaaagcttgtagcgaaaggtggttacacggataaagaaaaagaagttatttatgcagttgtaacgcgtctagaagtgacgaagttaaaatcaattgtgcatgaaattgatgaaaatgcgtttgttacgattatgagcacgcaagagacaaatggtggtaagtttaaatcggctattcactaaaaagtttataggaatatttttcgaaagcagagaatttttctctgctttttgttataatagtaaggtttcttgaaaaaatagatatattttaggcagattggtttacaactataataagctgtactataattcaaatagatataaatcggaatcattctgaattaaaataggtgagatgctatgaataatatattagaaattgaaggtttaacattccgatacgaagatcggaatgtgttagaaaatattaatttgcaagttccgaagggagcttttttaggtttagtgggaccgaatggttcaggtaaatcaactttacttaagtgtttattaggtgttttaaagccaaaagaaggaagcattcgcgtgtttggcgttgatagtaagaagtttaaggaatggaacaaagttggttatgtatcccaaaaggcaaatagtttcaattctggttttccagcaactgtttctgaagttgtgtcaatgggacttgtttcgaaaaaagggctttttcgctttttcacaaaagaggataagaaaaaggtagaaaaagcaattgctgatgtagggatgagtgagtttcaaggtcgtaacattggagagctttctggtggacagcaacagcgtgtatttattgctcgtgcgctcgttagtgatcctgaattgcttattttggacgagcctactgttggaatcgatgtgaaaaatgtggaaagtttttacgaaatattagaggatttaaacaaaaggctcgggatcacattaattcttgttactcatgatatgggagctgttactgaaaaagtaacacatgttgcatgcctaaaccaacatctacatttccatgggaatgtagagaagttccgagagttagaagatgcagaaatgtccgtcttatatggacatcatgttcatcgtttagaacacgaacatgagcatcacgggaggatataatgatacaagattttttacaatatgactttttacgtaattctttatacgcaggtattttaattggacttgttgcaccgttaattggtgtgtttgttgttattcgtcgtttatctcttattgcggatgcattaagtcacgtgacgttatcgggtattgcagcaagtttattacttgaaaaaaccatttttacaggtgggtttttaaaccccttatatatggggatgattttctcgattggtggagcgctactaatcgaaaagttacgaactgtatataagcactatcaagaattagcaattccaattatcctttcggcagggatgggggttggagttattttcatttcacttgcaaatggatttaacacagacttatttagttatttatttggtagtgtcagtgctgtaacaagtacagatttaattattattgggattgtagcaattgttgttgttgcgacaattattttattatataaagagctgtttctattatcatttgatgaggaatacgcagtatcaactggtttaagagcgaaatggattcactttattttcattatattagttgctcttgtcattgcagtatcaatgcgtgtagtgggggttcttcttgtatcatcattaatgacgttaccagttgcagcaagtattcgtattgctaaaggatttaaacaaacaattttcttttccattttatttggtgaaattgcagtaattggtggaatgtttgcttcgtatcaacttgatctagcgccaggtggtacaattgttatgatagcagttcttattttaatcggtgcgattttatggaagaagaaaaaaactgcataaagtagggataggtatgaatctaacagaagctttacgcctaatgaaagaaaaaggatacaaacatactggaaaaagagaagagatgctcagattatttgcagcacataatcgttatttaactgcgaaagacgttttagagcatatgaaggacgattatccagggcttagttttgatacgatttatcgtaacttaacagtttttgctgagattggtgttttagaacaaacggaattaaatggtgaaaaacattttcgttttacttgttctattatggaacatcatcatcattttatttgtttggattgtgggggaacgaaagagattacttcctgtccaatggattttatgaataaagattttaccggttatgaagtaacggggcataagtttgaaatatatggtcgttgtccaaaatgtgcaaagtaaaagctcgtcggttatataactgacgagcttttttacgtagaaaagaaggttgctcacaaatgttgtggcaaccttctttttattgttcttgtgtctctttttctttttctcgttcagcagccatttcagcagcaattacgtcgatttcttttttcagttcttctaccattgtttcttctggtactttacgaacgacttgccctttacggaataataatccctctccacgtgcaccggcaataccgatatcagcttcacgagcttcaccagggccatttacagcgcaaccaagtactgcaactttaattggtacttgaagtgtagagatgtattcttccacttcgttagcgatgctaattaaatcaatttcaatacgaccacaagttggacaagagataagtgttgctgcgttagacgcaagaccgaatgattttaatagttcacgagcaacttttacttcttcaactggatcagcacttaatgaaatacgtagtgtatttccgatgcctttatttaagattgctccaagaccagcagcactttttacagttccggcaaacaatgttccagattctgtaatacctaaatgtaatggataatcaaaagcacgagcagctttctcgtatgcttcaattgctaagttaacatcagaggctttcatagatacgataatatcgtggaaatctaggtcctctaaaattttaatatgatgtagcgcgctctcaaccataccatctgcagttgggtacccgtacttttctaaaatatgacgctctaatgaaccagcgtttacaccaatacggattggaataccgcgctcttttgctgcatttacaacagcttctactttatggcgacgaccaatgttacctggattgatacgtactttatcaatgccgccttcaattgcttttaaagcaaggcgataatcaaaatgaatatcagcaacaagtggaatgttgatttgtttttttatatcagcaatagcatctgctgcgcgttcatctggaacggcaacgcggacgacttgacagccggcttcttctaaacgcttaatttcagcaactgttgcttcaacatcatgtgtttttgttgttgtcatactttgtataattaattcattattaccgccgattgttaaattaccgactttaactggacgtgtttttgtacgatgagtcatttcattcacgaatagatcgctctccttataaaagaagtttcttatttagtccctcatatcaatgatagtatacgtgatatagggctatagaaaccgaagtactcggtttcacttttactattgtatcagcgcctttatgtaattgacaaggattaagtgatagcttattgatataaggggaatttataagactttccaatttgtatttttgtagcagatgtacttttgtttaattgtttaaagtcgtcaatgactttttctatggaaggaatttttttcttgttaatttgttctgtaatagaaagaactgtctcaccagtttttacttcaattgttttataagatacatccgtttctttttctgttttgttctctttattctgctgactgtctgtgttttcttttttaatcgtttgagcagcagttgtttttttatatgaacttaacatcggtaaagtaccgatttttatatcgtaataaaatatataaccgagaacaagcacgaataggaatatacctaatctcttcatattcttcactcctttgctaggaatatatgcttgtccaaaaaaaaaatgcctatttaggcattttttttcgttcttatttttctttcggttttggaacttctttaatcgttaagtacagaacaattaaaacaactgcgatatagatgaatgttgatccaggtacgacaatcttacatgcatccataatcataaagaagattgttgggattgtgtagctgtatgcagttagtgtccaaacttgtttataggatagtttacgttgaccgctcatagcagaaccgatgaacgcaagtaaagtcacacctacaaaagtgatgaataattggaataggtacactaagaatccaataacaaataataaaattggataaatattatcgaataaagaaataaattcttgtagatcttttttctcaagagatgcacctaacaaatcgttataagaatacgtttgtatttgaccatttcccatagagactactttatcttttaaaacaaataaacctgttttattttgatatttttctaggtctgttgaatttggatcaaatacgaaaagtgcatttccttcttctttttcaataggttgatcaatatcggcttttagttcgccattttcaattttaaaatcaggtaaatctttatcgatgacttgatttaccatgcttacaccatcttggataaaactaccgtacaaaaaagttcttggaatagtagtaattaagcaaagtagcataatatacaaaatggttttaccgattttttgaaaacggaatagcgccatatctttaggcgagtatatgctttttacgaattgggtaaatatggacatagattcacttcctttatgtatgtataaaatcattgtaacgtagtaatctagagaatctcaagatatattatatttacatatagtggagataactaaatttcttttattaactttcttcttttaaataagaaaaatacaattgacacttttcttttctatatggtaaatttatcttacatttcttaaagagcatatccgataggaattcctttatttgatatgttgttacatacataattgtggacccttagctcagctggttagagcagacggctcataaccgtccggtcgtaggttcgagtcctacagggtccatatccatttcacatgtttattatgttagcaggaagcttccttgtagaaggaagctttttttacggaatatatgagcattttaattgaaaagaagtggggattttgctactttaatgatagcaagacaatgtgatttatttgtttgcaccctatggcaattagggtagaatgaagttgtatgtcacttaagtggcaatacataaactgggaggaatataacaatggcaaaacacgaattaccaaatttaccttatgcgtatgatgctttagagcctcactttgacaaagaaacaatgaacatccatcatacaaaacatcacaacacgtacattacaaacttaaacgctgctttagaaggtcatgcagaattagctgacaaaagcgtagaagaattagttgcaaacttaaacgaagtaccagaagcaatccgtacagcagtacgtaacaatggtggcggacatgctaaccatacattcttctggacaatcctatctccaaacggcggaggacaacctgtaggtgaacttgcaactgcaattgaagcaaaattcggtagcttcgatgcattcaaagaagaattcgcaaaagctggcgcaactcgcttcggttctggttgggcttggttagtagtaaacaatggtgagttagaagtaacaagcactccaaaccaagattctcctttaactgaaggtaaaacgccagttatcggtttagatgtttgggagcatgcttactacttaaactaccaaaaccgtcgtccagactacatcggtgcattctggaacgttgtagattggaacgctgctgaaaaacgttaccaagaagcaaaataattgtaacaaatatagaaaaagctaggggagagcccctagcttttttctatgctttccttttacataattgggcttgtctttggaagactagaacatgaagtaaaggagagttgtgtatgaaatggaaacatataattggtgacgttgaagtgaatcgggatttagtgttattgctccttataggaggtttatacacgctcgcaatttctttatcgaatacgtttgtaaatatttatttatggaaacaaacacaaaattatgtgaatcttggcttgtataatttagccagcgtggtattacagcctctcacatttcttgtaggggggaaattagcgaaacgtatcgatcgctcgattttattacgaataggggtaggaacgctcgcaattttttttatcgttgtcttagtagcagggaaaagtgcttctcagtatattctattaatgggggctcttttaggagtaggatacggtttttactggttggcttttaacttattgacatttgaaattacagaaccagaaacaagagatttctttaatgggtttcttggacttcttacatccttctctgggatgattggaccaatagcagcaggatacacaatttcacgtatggagaaatggagtggctatactgttatattctttctttcattagttctatttgcaattgctgtcgtcttaagcttctttttatctaaaagagaatgtgaagggcgttatgaaatcgtgcaagtattgaaagaacgacggattgataaaaattggggaaagattacacgagctcattttttccaaggattgagagaagggacgtttatttttgtcatttcagtatatgtttatttagcaactaatagtgagttcgcattagggaaatacagtttagtgaactctgctgtatcctttgtatgttattacttagttgctcgtatgttaaagaaggagtggcgaaaaaaagcaattttacttgggggcattattttatatgctgtcgtctttttagttattttcaatgttacatacacgaaattacttatttatgcggcatgtattgcgattgcatatcctattttacttgttccgtacggatcaatgacatatgatgtaattggtagagcgaaaaatgcgagagaatggcgtgtggaatatgtcgttgttcgggagttatggttaaacgccggaagaatctgttccattttaagttttttatgtgctgtactattctttccacctgaaaaaagtttaccttacttattatgtattttaggtgctggacattttcttatttattttgcagttaaaaatgtcaaatatgatgagggaaatgcgagtaaaacaagtgttgtaacgcaagagaacgcgcaaaaccaaactgaaccagaaggttaacttctcgtttgttttatgctagaatagaaaaagatgtaagacagcagtgaggacacctgtatgagggtgtccctttcacattacatagctgttggtagagggggtttgtatgagcaagaagcagaagcaaaataagaaaaagacccacgttccttttcgattaaacgtgttgtttttctgcgtgtttttaatgttctccgcggttattgtaaggctcggatatgtacaaattgttcgcggtgaagaatataagaatgaagtggagaagaaagaaaactcaacgataagtaatcctgtaccgcgtgggaaaatatttgaccgttatgggcgacctgtagtagataatgcagccattcgtactattacatttacaaaaatgaagggatcaactgcagaggatcgcttagaaacagcgaaaaagctagcagatttgattgaagtaccgacagataaattaacagatcgcgataaaaaagattattggcttgctatgcataaagaggaagctaaagaaaaaattacgaataaagatcgtcaagagtttaaagataaaaaaattgatgataaagaattagacgagcgtcagagaagtcgtgtaacagaagaagagattaatcaattatccgccaaagatctagaaatactagcgattaagagtaagatggacggcggatatgcaatgacacctcaagttattaaaaaggatgctacagaaaaggaatattcgattattagtgaaaacctagcagcattaccaggtgtagatacgaatgttgattgggagcgaaaatatacgtacgatgatttattccgaagtgtacttggtggggtgtcgacatctgatgaaggcttaccgagagaaagactagattactatcttgttcgtgattacaatcgaaatgaccgagtaggaaaaagttatcttgaacaacagtatgaagatagcctgcatggtacgaaagcagaagttagaaatgttacagataaaaacggtaatattttagaaacgattaatgtatcaaaaggacaaagtggtaatgacctgaacttaacaattgatatggaattacaaaagcgcgtggaagatattcttgcgaagaatttaatgaggtttaaaggaagtgaacctcttttagatcgcgcatttgttgtaatgatgaacccaaaaaatggtgaagttttatctatggcggggaaacaattagttaacgaagatggtcaaacgaaagtaaatgactttgcattaggtaccatgacaagttcttatccgatggggtcaactgtaaaaggtgcaacagtacttactggatatcaaactggtgcgattcaaccaggggcagtacaattggatgaaccaattaaattaaaaggtacacctacgaagtcgtcttggaaaacgatgggatacattaatgaccttacagctttaaaaatgtcttctaacgtttatatgtttaaaacagcgatgaatatcgccggtgttccatatgtgagaggtggtacgttagatatacctcaaaaagcatttgatacgatgcgttattatttcggacagtttggacttggtgtaaaaacaggaattgatttaccgaatgaatctgctggtcagatgggtaagagtagtcaaccaggtttcttactagatttatcaattggacagtatgatacgtatacaccgcttcaattagcgcaatatatttcgacgattgccaatggcggatatcgtatgcaaccacaagttgtaaaagaaattcgtcaaccggcagtgaaaccagatgaagttgggaaagttgttcaatctatggaaccgaaagtattaaatcgtattgatatgccggaatcgcaaattaaacgcgttcaagaaggatttagacaagtgtataatgattcaggtggtacagctacaaagtactttacaggtgcaaaatataaagctgctgggaaaactggtacagctcaaactgtgtatggtggagataaagagattggtagaaatgcaaaaggtgaacgtgtggaaacatataacttaacattagtaggttatgcgccacttgaagatccagaagtagcattctctgttgtcgttccatgggtacatgatgataagactggtattaatggatatattggtcgtgaaattatggacgcttactttgatttgaaaaacaaagaagtaaatggtgaagctccaaaagatgataaagacaataaaaacaaagatcaagatgatgaataaaaaagttgtaaaaaagcacactatatgaaaagatagtgtgcttttttttatggtttatgcatatcgtgtaataaatgtggacaagtatacaacatttaaaaaacgcggccctataaatgatacttgtatatggtgggataggggataaatattttatagggaaatcatcagaggaaatgaatagctactactgaattaaaattgtatcgtatgttgatttttgtggaactttacaaaacttttacaaacaattaaaaccgaattaatagtttagcagtattcttatatctgtaatcctgttatttccggttacttctaggaggaagaacacgtgaaatggatgcatacaccgattaagattttcgtattatcaatatggttcctctgttttgaaatgtctactgcatttgctttaaatgatacgggagaagtgagagttgatggatcctcaacggtttttcctattatagaagcagtagcggaggaatatacaaaggtgcatccagacgtgaaaatttccatcagtatttctggaactgggggaggatttaatcgtttcagtaaaggagaagtagatataaataatgcttcgagagtaatgaaacaagtcgagaaaaatgaaatgaagaaaaactctattcagttcacaccttttgaggttgctaacgacggtcttacgattgttgtgaatcgccataatacatgggtagacgatatgtcagtagacgagttacgactactttggagtgaaaatggaagagagaagcgatggtcacaaattcattcaacatggccacgtgaacaagtgaagttttatgcaccaggcgtagactctggtacgtatgattattttcaaaatgtcatcttacaaaatcatcgcattgtaaaaaaagtctctttgtctgaagatgatcaagttattatgcaaggggtaatgaatgataaacatgccattgcttttgtaggatatgcttattatatggctaatcgagataaggtgaaagcaataaaagtaaatggtgtatttccgacgaaagagaccattcaatcaggtaagtataagccgttatctaggccgctacttgcttatgtgaataatgcatctatccgaaataaaatgaatgtagcaaactatgttgagtttatgattcagcatgtcggtaacctcgctgaagaggtcgggtatgtaaaattacgaaaagaaaaatacaatgaacagctgcgtatgttaacagaaataaaaaggtaatgtcagggtggaaaggggttttcatctttggctcataatgacaaaagtcaaattacattttctgtacaacatttgattgaaagaaatacaaaacaaagaaaaaaaaagcagcgaatcaatcgaatagtgcctttattactaaaaataattgctagcgtttctattgtgacgacacttggaattgtttttacgctctctaatgaaacaatcatgttttttcaaaaaatatcattatactcctttttgacggagaaagaatggttaccattttttgaagaccctaaattcggtatattaccactcatatgtggaacgttccttataactgcaattgctatgtttgtagcaattcctatcggtttagcgtgtgccgtatttttaagcgaatatgcttcaaatagtgcacggaaaatattaaagccgatgttagagctattagcaggtatcccgacaattgtatatggtttttttgcattaacaattgttacgccgcttttacaaaggcttataccagatttacagttttttaatgcgattagtccaggaatcgttatcggatttatgatgatgcctacagttgcatctctatctgaagacgcgatgagagctgtgtcgaaagggacgaaagaagcttcattagcactcggggcgacgcggtttgaaatggtaaaacaagtggtgtttccgtccgcttttacagggattatggcagcaattatattagcggcttctcgtgcaattggtgaaacgatgattgttgtaattgcagcaggatccacaccgaatgtatcgcttgatccgacacattctattcaaacgttaacagcctatattgtgcaagtaagtttaggtgatgctccgcatggaacgattacgtattacagcatgtatgctgtaggtgcaacgttatttttgtttacctttattatgaacatcatttcgcagtctattatgcgccgttttaggaggatgacataatatgcgaatgttgaatcataaaaaaatacaaaaaaacatggcatcacgctttttaaaagatcgaatttacaaattgttattttatatagcaattttattttcaatggtaattttgtttttgttactgtttcaaattgttgaaaaaggtataagttatctttcaataaatttctttacaaatttcgcttcacgtaatccgaaagaagctggtattgctgcagctttgtcagggacaatattatttatgagtattgttatacctgtttcttttatatttggagttggaacagcactttatttagagcaatatgcgaaggaatctctatttaaaaaaataatagagattaataatcaaacgttagcaggagtaccatccgttgtatttggattgcttggtttaactatttttgtatatgctcttcatttaggagagagtatagttgcagcagcactgacgatgagtctactcgttttaccaacagttgttgtggcgagtcaagaagcaattcgatcagtaccaagtgtattattagagggttcttacggattaggtgctacgaagtggcaaacgatgtatcaaattgtattgccatatgctttcccagggattataacgggctgtacgttagcgatatcaagagcaattggagaagctgcaccactattagttattggggcacttgcgtttgcaaattatgttccatttagtatgtttgatagatttacagttctaccaattcaaatttttaattggatgagtaggccacaagaagaatttcagtatgtagcagcagctgggatgattgttttgttaggtttgttgctatttattaatatatttgttttatggttacgaaatcgaaaataagttggaagtggatgaaaggggaattcaaatggtagcaacagtagtaaatgtacaggtgaaaaacgaagagaaaatcgagactgcgccaaagaaggtagtatttgatacgaaaaacttaaatttatggtatggggaagaccatgctttaaaagatattaatttaagtattcatgagaatgaagttacagccattatcggtccaagtggctgtggtaaatcaacttacttaaaaacattaaatcgcatggtagaattagtaccgattgttcgaactacaggtgtaattgaatatagagaacgcaatatatttgataaatcatatccagttgaagaattaagaacgcatgtaggaatggtgttccaaaagccaaatccatttccaaaatctatttatgagaatgtagcatacggtccaaaaatccatggtattcgtgacaaaaagacattagatgaaattgttgaaaaaagtttacgtggagcagcgatttgggatgagttaaaagatcgtttgcacgataatgcatacggtttatctggtggacagcaacagcgtctatgcatcgcacgctgcttagctattgagccagacgttattttaatggatgagccaacatcggcattagacccaatttcaacattaaaagtagaagaattaattcaagagctaaagaaagattttagtattgttatcgtaacgcataatatgcaacaagcagcgcgtatttcagacaaaacagctttcttcttaagcggggaagttgtggagtatacagatacaaacaaattatttacgactccttcagataagcgtacagaagattatattacaggtcgctttggttgatatcgtttcaaagctaagagcaaatgccctcttaacagagggcatttcttattttatcttactgttaatagagaactaatacttctccttatcttaaggtttattacaagcgcaagaggctatgtaggagatttaccccgctatttgcgggcagtaagacccccaccttaaaatttagcgaaagcaaagaagttagggaggggatcttgctgcctatcaaatcccgattgatgagggttgattaaagtttcacttttatataatggcacataatattgagggggaagaaaaatggtaagagaacagtttcaaggtgatttaaaagcgttacagcaaaaggtgatcgagcttggagaattagcaaatgcggctttattgatggctatggaaggtctgcatacaagggatgtagagaaagcgttagaggtcattgatggtgattaccgcatggataatttagaagaggaaataaacgatcttgcgcttatgctcattacgaagcagcaacctgtagcaagtgacttaagaaggatttttatttcaattaaaacagcgacagatttagagcgtattgcagatcatgctgttaatattgcaaaggctacaattcgtcttggggaaaaagaagtggctgttagtttgcacaacctggatgaaatgtttgcggttgcaaatgagatgttgcatttagcgctagaagcatatgaacaagaaaatttaacttttgcgaaacaaattgctgaaatggatgattccgttgatgaaatatatggaaaagcaattcgtgagtttatatcgtcggttccggaacaaccagaagcaattacgcaaattacacaattatcatttgtcgcgagatatattgagcgtgtagcagatcatattacaaatattgctgaaaatgtcttttatttagtaaaaggaaagcattatttattgaatgagtaggaataaaagcaggtgatgagaaatcacctgctttttttagtcaaaacatgacaaaaaaagctcgttgtttcctttagtttatgatgataagatgtatcataatgtaatggaaaaattagtatatatgtttgtcgttaataagtattatttaccaatttatagtaagcgctttcttgttgtttgaaacatacgtttttataggtgagaaatttaattatatggtcttctaaatgaggatttgtttaactaatcaagtttatgctgctagttcatgtgggatagggaatatacatatggtatatggagttactgaacattatataagtggaggctgaagtatatgaagggggttattttagctggaggaaaaggaagacgccttagaccattaacatgcaatactccaaagccgatgttaccattattagaaaaaccagttttagaatataatattgagttattacgtcagcatggtattcgtgaaattgcaattactgttcaatatatgagtacgaccattaagcaatattttggtgacggtagtaaatggggagttaacttgtattattttgaagactctcctccgcttggcacagcagggagtattaaacaagcagaacaatttttagatgaaacatttgttgtgataagcggggatgcattaactgactttcaattatcagaaggaattaggtttcatgaacaaaagaaaagaatggtaacaatgtttgtgaaagaagtagaaaatccactctcatttggattggttgtaatgaataaaaaccaggaggttacacgatatatagaaaagccgggctggaatgaggtagtatctaatgttgtgaatacaggcatatatattatggagccagaaatcttttcttacataccgcctaggcaattttttgatttcagtcatgatgtgtttccattattggcaaacaaaaatttgttattcgcatatttgtcagaaggttattggttagatatcggcacatttaatcaatatcgacaagcacaatttgatttgttaacgaaaaagttacaagtacctattccttatacagaagtattacctatggtatggatgggggaaggggtgacgattggtaaagggacgaaaattcatggcccctcttttattggagaaggagcaaagattggtacaggagctgtaattgagccatattctattattgggaaaaatagtatcgtttcaagttattctcatcttcaaaaaagtattgtttttgcgaatgcccacattgggaagtattgtgaactattagaaacgacaataggagagcgtacaatagttgaagatgatgttacactgtttcaaaaaagtgttgtagcggatcactgtcatatcgggagaagtacggtaattaagcaaaaaggaaaactatggccttataaggcgattgatagtcattcgatagtaggagcggctggtattcaagagagtgaaatgagtgcagggtggttacaaaaaagccgcattgtaggaagagggaatgttgaaattactccccagtttatcgtgaagattgcgatggcgtatggttctctttttgaaaaaggagaaagtatattaattggaagtcaagaaaatatagaaacaacctcttataaaaatttatttttacatgctattcatggtatagggattcatacgatggaatgtaaagaaatgaacgagtcactttttcaatatagtgttcatcatttgcaatgtgcaggtggtgttttcattcaagtggagaatgagaatgagattgttataaagttatacggtcaagctggcatgccgttaacgtataagcagcaaaaagagatagaacaaatatatatgtccgaattgttttattacgtgcaggagaaagaaatggggcgtaataagctcgttcatgtttctatgaatgagtatatagaagttatattggagcatattgatatcgagaaaatacagatgcagaagtttcatcttcttattaataagagaaatgatacgttgcaacatttacttatgctctttctgcaaagacttggttgtacagttacatggatttatgcaagcgaacaaaaagatcatgtgaaagctttgatgaaatcaagtaaagcgaatatggctcttatgttttcggagaaaggaaatcatttcgagttatacgataaacatagtaatatttaccaaggtacagattttgaagaggtagatattccagatttcttgctcgaatcgacaggaaatatttacccaatgtctttgaagttaggagaatgttatcttctattttatacgcaggatgaaagaaaatcgtttcaagtgaggtggaagcgagatattttatatcggattggaaaattattcgagctaatagcattgcaaggaaaaacgtttctcagcatagtagagcaatcacctccgctctatttactttatgatgaagtggtatgttcatggaatgaaaaaggggaaattatgaggaaattattggatgatatagaaaggaagggagaagggatatttgaaggagtgcagttcaaatatactgaaaaagagtggtcttatatcgtttctgacataaaacaaccaaaatttttggtgtattcacatgctagaaacccagtaatagcaagggaaaatatgaaaaatcttatagaaaaaattagacaatatcaaaaggtgtagaatttttattttaaaagtggtattatagtatagtctgatttaagttattagtactggagggaaataagaatgcgtgtgaatattactctagcatgtacagaatgcggagatcgtaactatatctcaaagaaaaataaacgtaacaacgctgagcgtatcgagcttaaaaagtattgcaagcgtgacaagaagtctacgttacaccgtgaaacaaagtaagcagtaggaatattttcctactgtttctttttttattcgattcctatgttaaaagtgatacactatcagcatagagtaaagtgtcactgtaagggggagaatgtgtgaaagcagagaaagtacgtttgcgtaaacaaataatagaacacatgaattctttatcagaagaacagtatacaactttatcagaacagattgtattttcgttgtatgcgcaaaaagagtgggttgaagctaaaacaattggaattactctttcaatggaaaatgaagtgaatacatatcctattatcgaaaaagcttgggaagaaggaaagaaagttgtagttcctaagtgtaataaaggaacaagaacgatgtccttccggcaaattaataattttgatcaattagaaacggtgtatatgaatttacgtgaaccgattcccgggcttacggaagaagtgaatatggatgaaattgatcttcaaattgtcccaggcgtagcttatacagaacgaggagagcgaattgggtacggcggtggctattatgatcgttatctcgtgcattataaagggaaaacgctgtcattagcgtatgattttcaaatggtaaaacacattccggtagagccatttgataaaaacatagaaaaaattattacagaaaaaggaacactgcttacaaataagcttgtatagacaaataaaaattgacgagactttttcttcttgattataataaaatatgtgaacgttttcttattataattttttatagtaagtgagcatagagggtgatgaaatggtatctatttatgatattcagcaattgctaaagaaatttggtacgattatttatacgggagatcgaattgcagatttacaattaatgcaagatgaattgcgtgaattaaatcaatcacagctaatcgatccacaagactatcaaacagctttatttttattgaagcaagaaattcaaaaagagctaaataagaattagataaaggtaggtaagcaacatggaagagaaatggttagttggtgttgaccttggtggtacaacgattaaattagcatttattaatgtgtacggtgaaattttacataagtgggaaatccctacgaatacaggtgagcaaggaaaacatattacacttgatgttgcgaaagcaattgataaaaagctagaagaattaggcgaattgaagagcaagttaattggtattggtatgggagctcctggtcctgtacatgtggcgtctggaatgatttatgaagcggttaatttaggatggaaaaactatccgctaaaagatttattagaagtagaaacaggattacctgttgttattgataatgatgcaaacttagcagcgcttggtgaaatgtggaaaggtgctggtgaaggtgcaaaagatttaatctgtatgacacttggtacgggcgttggtggtggtgtaatcgccaatggtgagattgtacacggcgtgagtggtgctgctggtgagattggacatattacagtcgttacagaaaatgctttcccatgtaattgcgggaagtctggttgcttagaaacagtagcatctgcgacaggtattgtacgtgttgctatgcaaaaaatacaagagactaataaagagagcatgttgcgttctatgttagctgaagaaggacgtattacatcaaaagatgtctttgaagcacttggacaaggtgatgaattagcaggtgaagtagtagaaaaagtagcctcttatttaggattagctgtagcgaacctttctagtacattgaacccagagaaaattgttattggtggaggcgtgtctaaagctggagatgcgctattagaaccaattcaacgctatttcgagcaatacgctttctcacgtgctgtaaagagcacgaagttagctattgcaacacttggtaatgatgcaggtgttatcggaggagcttggcttgtaaaaaagcacaaatacgaagcgaagatgatataagttgtgaaatatgaaaagaggaagggggaacccttcctctttttgtgtgaaatctcgatgaagaataaagtgtaaacgaattaagctgctggtggatacccgttatatagaacagtcatgatcgtaaaccatccgaaaacgagtacagttgcaattgcaaagccgctcgcgaaaaagtttttttcacgaagtgttctaagcgtagcaaatacagctaacagagtgacaagtgtaaaaataataacaaggcccatacaatatcctcctctgtctacccatttcttattatgagtttttggaatatttactcttttatattgtacatgttttaaaaatgattgtcgagatagcatcctttcttttcctcagagaaagaaatgttgtatcattaaaagtaagtttaataactggaggagattttcatatgaaatggatacaaatgccgttaggcccattacaaacgaatgcttatattttaatgaacgatcaaaaagagtgcattatctttgaccctggtcatgaaggtgaaaagctcgttacatatttacaagaagaacaattaaaaccattagctgttttattaacacatgctcactttgatcatatcggtgctgttgatgcggtaagagacacttttcatattcctgtgtatgtacataaagaagaagcagattggttaggagatgcaactgtaaacggctctcaaatttttatgatgaaccgcagtattacagcaaaaccagcggatcatattattgatgcagaaggtacattaacaattggatcatttaattttgaaatttttgagacaccaggacattctccaggaagtatttcttattatagtaaagaggcgaatgctgtattctcaggagatgtattgttccaaatgagcattggaagaacagatttacctggtggaagtttcgctgaattaattggaagtattgaagagaaattatttgtattaccagatgaaacagcggttttatgtggacatggtccagaaacaagcattggctttgaaaaagaaaataatccgtttttacaataaggagtcattatgggaatggagctcattttaagagaatggatggggaaagaaaaggattattcaatttcatatagtacgtatatgaaccttgtattgtatacagaaggtcatggatattatatgaaagaacgtgaaaagattggaagacaaggggatttttttacaagtagcaacgtatcctctgtgtttgcaaaaacttttgctaaactttttattcgtcttgttgaaaatggtgaagttgctccgaatatttgtgaaattggcggaggaacagggaagtttgcctatgatgttttacaagaatggaagcaattatctccaaaaacctttattgatctaaactattcaatgattgaagtgagcccttttcatagaaaattacagcaggagcaccttggctcattttctaatgtatcgtactatacctcctatagtgaaatgggagattctttcgagggaattcttttttcgaatgagttgtttgatgcatttcctgttgaaataattgagaaaagaaatggtatgttgtatgaagtacgtattacatatacagaggaaggaaacctttcagaagtatgtaggccgttagataaaagaattggtcgctatttattgaaatataatattcatattgctgaagggcaacgttttgaagtaccaattgtgatggaggagtatataaaagaaattgcgaaatggtttcaaaaaggtatatgtattacagttgattacggatacacaaaagaagaatggatgtatccagcacaccgtgaaggaagtttgcgagggtattatcagcataagctaatacgtaacccactagcgcatccaggtgaaatggatcttactactcatattcattgggacgagctaaaggagatgtttagtatgcaaggaatgagtgcagtatggcataagaaacaatctgagttcttgttagctgcagggatattagaacagcttacgagccatcaagatatgaatcctttttctgaaacgcaaaaacaaaatcgagccgttcgttctatgattttgaatggaggagtagggagtgcatttgatgttgttatacatacaaaagatatgcaacatttacatttggatcgatatgtaacaatataaaaaaacaagacacagtatatactgtgtcttgttttttaatacgacttatgtagtattatatatttcctctcatgatatatatttatattaaagatatgagatgaaaaatatagaatacgttctttttcttcgattattagtccctaacctaataatacgcgaacgagttgaatgattgtttcattctctactttgtaataaatttccaatccttttctttcactagaaacgattttagcgctttttaattttgctaaatgctgtgaaattgtagattgtggcatgtttaagccagtatacattgtagaaacgttgcttggaccgcgctcgattaatccttttacgatacataaacgaacaggatgagctagcacttttaataattctgcattactttcatatagttctaattctttttgaaaggtttctaacatgttcttttccacctccgtgtgagctattataccatactatacataccaaaaatttaaagaaaagaaaatagttgttgcagaaaaaaagtcctaaagtaaagaaattgtaagaaaagagaccctgatgtaaataaaataggtaaattagcatgtttttgtaaaatgacatttttgggtgaaaatttcgatgtgttttaaaaattgaaagatatagatatatttgtaacacaattttatcatgattttcttattctttcaaatgaatatacaaaatttttaaaataatatgacaaaggaattataatgatatatatagaatataaaacaggttaaaagaaaagaagctgaatgtaattcgcttctttatggtgataatgaaatatttgcttacggctgataaatcttaggatgatcaagtcattagtcatttattctaaaattcatcttttagcaacgttaaaaacctgtgattccatatgttctcataaaaatcaattgtctcttttgcggacataaaaggattattcaacgtagaggttgttttctgtaccataaagttttcgtatcctagtccgtgggcaaacttaatcgtagcatccatacagtactctgtttgggcgccacaaaattcaatgcaatttacagataattgatctaaaatttcttttaagtttgttttataaaatgaatttgcatgtgtttttcttacaaaaaaatcttgttcttgaacatctagatcggtatgaatagcccaaagttctttctcgggtactaaatcatcatcacaatgttgaacaaaaaggattggtttatttaattttctgtatgaataaattcttttatttacttttgttagtaagttctgtaaatcaaataaatgctcctcgctataacatacgccattttgtaaatcgataacgattaaaatatctgaacaaatatccattattttcacccctttttatttcttaatatatcaattaatccattatttagaaatagatgatatacttttatttttttatggactataagaaaagaagaaattcaaatgaatataactaaaacgcagaaaaagaagatatgaaaacctaatctcatatcttctttttctctatgcatttacaggttcttctacataagaaagggcattttcaaaatcggatattaaatcgttaacattttcaagaccgactgataaccgaagtaatgaattagagattcctctttcatcacgagcttcttgcgacagtgctgcatgtgacatttttgctggataagaaagaattgactctacagctcctaaactaactgcaaaaacaggtaattttacttttgataaaaattggcggagtgcatcttctgactgcaaagtaaacgataagaccgctccagctgatgttgcttgagattgttgaatatcaaatccgagatgtgtttgtaatcccggataatagacattttgtactttagcgtgctcttgtaaataatgtgcgattttattggcatttttagctgaatgctcgaggcgtacgtgcaatgtttttagaccgcgaagtacgagagaacaatcttgaggtcctaaaatagcaccgaatgcattttgtaaaaatccaagcttttgagcgagttctgcatcttttactactgctaatccggcagtaacatcactatgaccagcaataaattttgtagcactatgaagaacgacatcagctccaagttcaagtggtttttggaatagtggtgtcaaaaatgtattatcaacaaaagtaagagcgccaatagattttgcgagtttagaaacctcgcgaatatctgtcacttttaaaagtgggttagaaggtgtttctacataaaagagctttgtatttggtttcatgttttgttttatttcttctaaattggtcatatcaacaaatgtatgtgaaacaccgtaacgggagagtacctcagttatcactcggtaagtgcctccgtacacatcttctgaaatgagtacgtgatcaccttgtgaaagaaggaggaatgcagtggaaatcgctgcaatgcctgatgcaaaggcgaatccttttgttccgccttctaataaagtaatgatatcttcaagagcttcacgagttggatttcctgacctgctatagtcatattttccgaacgtatctacatcaaactggtgaaaagttgatgtgttataaataggaacgttcacagcgcctgtttgcgagtcatgtttatattggttgtgtagtaagagtgtatctatagaatagctcatattcttacaccttcttttacgagtttaatggcttgctttaagtcttgaattaaatcgttactattttcaatgccaactgagaatcgaagaagacgattgcatacgccgtttgctgttctaatttcttcaggaatatcagcatgtgtttgcgttgctggataagtcattaaactttctacaccaccaagactttcggcaaatgtaattaaggataaagattgtaagaatggattaatccaagcttcatctttaaggcggaatgaaatcatgccgcctcttcctggataaaatacatctgtcaccccgtcttcatcatttaaatacgcaacaactgctttcgcattttcttcatgttgtctcatgcgaagcgctaacgttttcataccgcgaattaataaccatgagtcaaatgggcttaaaactgcacctgatgcattatgataatgagcgatttcctcgcaaagttcctttccttttgcaacgacaagcccgcttagtacatcgttatgtccccctaaatatttcgttgcgctatgaagtacaatgtcagcaccttctgttaatggttgctgtatataaggtgtgtagaatgtgttgtctacaataagaagtagtccgtgccttttcgctacagttgcgacagcagcaatatcagtaacttgcattaatggattagttggagtttctatgaaaatagccttcgtttcagttgtgatagcttgctcaatttgtttaatagactgtgtatttacgtatctacatcgaacattccactttttttcatgctcagaaaataatcgatacgttcccccgtataaatcttcagatacaataagttcgtctccagagcggaatagagaaaggacgaggagaacagccgccatccctgaactacaggcataaccttgttcgccatattctaagtctgcgatcgcctgttctaaaagaccgcgagttggattgccagttcgtgaatagtcaaagccagtagatttaccaattccttcgtggcgataagcggttgagaaataaactggtggattaaccgttccagttgtagtttcactacgatttccgatttgtgctagttttgtttcgattgttgacatgtgaaaattcctcctttttaaattgaaacattaagtgaatataaaataaaaaaagccttctaagaagaaggctttcggtttgaatagagtcttcttctcatctgtcaaatctttcacaatttgctggaattagcaccttattaacaaaatgttaatggttgctgaggcgtcacagggccagtccctctacctctctagataagaatgttcgtatgaaatttttattatgtttttaactttacaataaaagataattgaattgcaactttattttaaataatttttatttttccgcaagtgtcattgacttttaattttgtgcatgctaaatttattaaaaaattaacaaacattgttaaaaggggaacgcatttccttttagctacataaataaaataataaagacaactcttattgagagcggtggagggaaaggccctgtgaaacccggcaaccttcaaacgaaatgtttgaaacggtgctaatacctgcaaaacgaatgttttgcataataagaggaggaacaattatgtccccctcttcaaagtgaagagggggtttttatattgatagaaatgagggagattcgtgaaattactagatttattatcaaaaggaattgtaataggtgatggtgcggttggaacgttattgcattcacatggtttgcaaagtagctttgaagaattgaacgtatctgatccagatctaattatatccattcataaacaatatgtagctgctggagcagatgtaattcaaacgaatacgtatggagcaaatgaggcgaaattacgtatgtatggtttagaaaatcaagttacaaaaattaatagagcggcagtgaaattggcgaaagcatctgtgacagataaaaatgcaattttaggaacaattggtggtatgaaacatatcggagctgttacaacgactgatatggaaagggagtttatgttacttgaacaggcgggggctttactagaagaacaggttgatggattactattagaaactttttatgatgaatttgaattacttcatgctgttaaagtgttgcgtaagcaaacgaatattccgattgttgcgcaattagcgttacatgaagcaggtacgactcaaaatggaaatgatgtcaatgaaatattaaagcagtttatagattacggtgcaaatgttgttggattgaattgtcaactggggccgcttcatatgacggaagctttcaaaatgatatcgattccgcaaaatggctatttatcagcatacccaaatgcaggtctcccgaattatgtagagggacgttacgtatatgagggaagtccagcttattttgaagcaatgacaccgaattttattgagcaaggtattcggttattgggtggctgttgtggtacgactccagaacatattcaaagtatgaagcgcgctgttgcgaatattacccctgtaatagaaaaagaaacgattcaaaggccaaaagtcgttcatacgcatgagaaacgttcgaaggctcacgtcactctagcagagaaagcaaaaaaacaaacgacagttgtagtggaattagatccaccgaaaacgttagatacacagcgtttttttgaaggagcaagagcgttaaaaagagcgggagcagatgctattactctagcagataattcattagcatcgcctcgtgtctctaatatggcgatgggtgcgttattaacgaagcatgatatcccagtattgacgcatttaacgtgtagagatcataacgtcattggactacaatctcatttgttaggtttatcggcgttagggatggaagaagtgttagctttaactggtgatccagcgcgcgttggtgattttcccggtgccacttctgtatatgatttatcctctattgagcttattaaaatgattaaagaaatgaacgatggacgttcaattttagggaaatcaattggaccggcgacaaggttttctgtaggcggcgcatttaatcctcacgtgaggcacttaaaagcagcagttaagcgaatggaacgaaaaatagatgctggagcggagtattttttaactcagccaatttacgatatcaagttaattgaagaagtgtatgaagcgacaaagcatttggaacaacctatttttattggaattatgccgttagtaagtaagcggaatgcagattttcttcattttgaggtgccgggtattactcttcctgaagaaataagagagagaatggatggacatgaaacgaaagaggcagcaattgaggaagggattcgcatttcacaagaattggtcgacgcagcgatgaaatattttaatggtatttatcttattacaccatttttaaagtatgaaattacagaacatcttgttaaatatgtaagagaaaagcaagaagtgaaagaaggtattaattgatgaagtgtatagaagaaaaattgaaaaatagcattttaatattagatggtgcaatggggacaatgattcagcaagaggatttaactgctgaagatttcggaggagaagagtacgagggctgtaatgaatatttagtggaaacaagaccagacgttattttaaagattcataaagcttatattgaagctggagcggatattattgaaacaaatacatttggggcaacgaatattgtactaagtgattatgagctgtctcatttagatgaagaactaaatgaaaaggcagcacttttggcgaagcaagctgttaaagaaagcgggaatgaagtatatgttgcgggagcgatgggaccaacaacgaaagcaattagtgttactggtggtgtgacttttgaagaattgattgaggcttatacaaggcaggcacgaggattattaaaaggagaagttgatgtattactcgttgagacgagtcaagatatgcgtaacgtgaaagcagcttatattggaattcaagctgcttttgaagaactgaaaaaaacggttcctattatgatttcaggtacgattgagccaatgggaacgactctggctgggcaaacaattgaagctttttatttatcagtagaacatatgaaaccattatctgttgggttaaactgtgcgactggtccggagtttatgagggaccatattcgttcactatctgatttatcggagtgttacatttcttgttatccaaatgcaggtcttcctgatgaagatggacattaccatgaatctccatcttctcttgctgaaaaggtgaagcgatttgctgaagaagggtgggttaatattattggtggttgttgtggcacgacaccagaacatataaaagcaatgaaatccgcgctagcatctcttaagcctcgtgaccatcatgagagagaaggacatggaattagtggattagaagcactgcaatatgatgagtctatgagaccgttatttgtaggtgaaagaacgaatgttattgggtcacgtaaatttaaacgattagtagcagaagggaaatttgaagaggctgctgaagtggcaagagcgcaagtgaagaaaaatgctcatattattgatatttgtatggcagatcctgatcgcgatgaaatagaagatatggaaaacttcttagcagaagttacgaaagttttaaaagtaccgattatgattgattcaacagatgaaaatgtgatggagcgagctcttacttatattcaaggaaaagctgttattaattcaattaatttagaagatggagaagaacgatttaaaaaagtgacaccgcttcttcagaagtatggtgctgctatagttgtaggaacaattgatgaagacggtatggcggttagtgcggagcgaaagatagaaattgcgaaaagaagctatgaattacttacaaagaagtatgggatacgcccgtcagatattatttttgatgcacttgtgtttccggtagggacaggtgatgaagaatatattggttcagcagcagcgactatagaaggaattcgccttattaaagaagcgttaccagagtgtttaacgattgtaggggtaagtaacatatcatttggtttaccaccggctggacgtgaggtattaaattcagtctttttatatcatgctacgaaagcagggttagattacgcgattgtgaatacggaaaaattagaacgctatgcgtcgattccagaggaagaaaaacgccttgcagatgcactactgtttgaaacgacgaaagagacgttagaagaatttacaaacttttaccgagttgctaaaaagaaagatatcgttgtgcaagaaacgttaacgcttgatgaaagactagcaaattatattgtagaaggtacgaaacaaggattacacgaggatttaagtcttgcgcttgaagaaggaagaaaacctcttgatattattaacggtccgcttatgacagggatggatgaggtaggacgactatttaataataatgaacttattgttgctgaagtattgcaaagtgctgaaagtatgaaagctgctgtaagctatttagagccacatatggaatctagtgatagtgcgaaaaaagggaaagtattattagcaactgtaaaaggtgacgtgcatgatattgggaaaaatctcgttgaaattattttagcaaataacggatatgagattattaatttaggaattaatgtacgttcggatcgaattgttcaagaagtacaagaaaagaagccggatattataggcctttccggtttattagtaaaatcagcgcaacaaatggtaacgactgctgaagatttaaaagcagcaaatattgatgttcccattgttgtaggtggtgcagcgttaacgagaaagtttacagataatcggatttcaccatcatataaagggctcgtttgttatgcgagtgatgcgatgacggggctcgatattattaataagcttcaaaaagaagaagagcgtgagaagatgaaacaggataaaaaagaacgtcatcttcatatcgtaaaaaaagaggagaagaaagtagaaattccagcagtaattgagtcattaccgaaggctgaagttatcgtgcctgattcaacaaaacgaattgtattacgcgatattccggcccttcatctcgctccatttttaaatagacaaatgctacttgggcatcaccttggattaaaaggaaatgtgaagaagcttttgaaagagggagataagagagcacatgaattaaatgatttaatagatgaattattgcaggaaggacaatcttggttaaagccgaaagcagtgtatcaatttttcccagcgcaaagcgacggacaaaacattgtaatatatgatccagaagatcatacgcgtgttatagagcgtttcacattccctagacaaggaaaggctccctatcgtactttaggtgattatttgcgcccaataggagatgagatggactatgttgctttcttatctgttacggttggggaaggagttcgggacattgctgaagagtggaaggcgaaaggtgattacttacgtagtcatgccattcaatcgttagcgcttgaattagcggaaggacttgctgaaaaaacacatatgctcattcgtgaccgctggggcattccggactcacctgaactgacgatggaagaacgtttccgtacgaaatatagaggaatacgagtgtcatttggttatccggcgtgtccagaacttgcagatcaagaaaagctatttcgcttaattcatccagaggaaataggtatttcattaacagaaggattcatgatggagccagaagcgtccgtaacggctatggtattttctcaccctgaggcaagatattttagtgtattatagtctagaagggggagacgtatgaagaaaatagtctttacaggtggcggttcggcaggacatgtaacacctaatttagccattatcccatatttacaggaagacaactgggatatctcttatattggttctcatcaaggtattgagaaaacgattatagaaaaggaaggcattccctactatagtatttcgagtggaaagctacgtcgttattttgatttgaaaaatataaaagatccttttcttgtaatgaagggtgttatggatgcgtatgtaaggattcgaaaactaaaaccagatgtaattttttcaaaaggcggtttcgtatctgtaccagtcgtaattggaggatggctaaatagagtaccagttttattacatgaatctgatatgacaccaggactagcaaataaaattgcgcttcgttttgcttcgaaaatatttgttacatttgaagaagcagcgaaacatttaccgaaagaaaaagtaatatatacgggatctcctgtacgtgaagaagtgctgaagggaaatcgtgaaaaaggtttagcgtttttaggtttttcacgtaaaaagccagttattacgattatgggaggcagcttgggcgcgaaaaaaattaatgatacggctcgagaagcattaccagaacttcttaaaaaatatcaaattgttcacctttgcggaaaaggtaaccttgatgaaagtttacaaaataaagaaggatatagacaatttgaatatgtacatggagaactgccagatatattagcggtaacagattttgttatttcacgcgcgggctccaacgcaatttttgaatttttaacattacaaaagccgatggttttaattccattatcgaaatttgcaagccgtggagatcaaatattaaatgcagagtcctttgaaaggcaagggtatgcctccgtattatatgaagaagatgtaactgtaaaatctcttataaagtatgtcgaagaattgaatcaaaataatgagaagtataaaacagcactaaaaaaatataatggaaaagaagcaattaaaacaatcattcaaaatatttcagaggcatgatgaaacaatcatgcctcttttagtagggtgaaagattccaagaattgatatttttatgttacaataaagtgaaactttaatcagttgggttcatcccacatctaacttctttactgttactaaattttgaggaggtagtcttactgccctcaaatagcgggataacaaatgggttaatagggaaattccaattaatgaggcgtgaaaatacgaatggattaggagtgactgtgttggagctaagtctctatgaaaatactgcacttattatatgctttgtgttgtacgttggtagtgttattgtttatatttcaaggaaattttcgcaagaaagagagcttgaaaagtcagagataacagctgaactagaaatgttagctgatgaaagttataaaaaacaaaaaataaaagaagaccatgaagcatcccatcatttaaacgcaaataagttttaaagatggggattttttttgaaattgttctttattatagctataacaaataacgctaaaaaggagtttccccatacacaatgaaggagtgtatataaatgaatttttatatcgcctcaggtttccaaaataaacatcttgtacattccgtagcaaatgaactgaaacatgcaggatggcaccatacatatgattggaccaaaaatgaaagagcagcgaatgaagaacaattaagagaaattggtcaggcagaacgaaatgctgtaaaagaagcggatgtatttttacttatattagatggcggaaacgggagccatacagagtttggaatggcgattgcactagagaaaacgatatatgtatatcatgcaggaaacccgctccaaacaacgttctatcacttgccagaaataaatatttttgaaggagatgtagctgagtttgcatcttttgttatgaatcatgtgaaataatagtaactacctaaaaggttataaaagtgatcttttgggtacagtgatgataagaaacgtatataaaggagtacataatatgaaattagaaaatggatgggaaacgagctttttagaagtcgtacaaaatagtgaatttaagaaagaggcacttcttagtcaattgctttgtcaggatagtgaagaagtagaagagcttgtggatgattacggctacgaagaacttgttgaacgtgaacatgatgatgagttagctgaaatcttaggagaagaactttttagtgagatagaacgccaagtattcttatcttcaaacccagaagaaaaacttatttcattcgtcaatggattaggttttcatgtgctagattggatcgttcttcttgaaacagaatttggcattgatagtgcaaactttacatcagatgctgtgaaggtgttagaaaagcgtttcagacagtttccatacatagaggacaagacaatttttgatatgacatttggagaatcgatggatgtattagaatctgttacaggattacaactaaaggaaaagatgaacgtataatgaaaaaagaacgtgattggatcacgttctttttttacataataataattttatcatctagttttgtctgcccggtaagaagtgcgtttaaatattccacttttcttatacaagcttgtatatgtctttcaatctcttgtaactctgcttggtgatgcgtttcaattggatgaatttgtacgttgaatttttcaaattgactactatatgttatttctgcatagccgctcataatatcggtttcgttatgaaataaaaattgcttcgttttgtcacagaatgatacatcctgaaagccatatacttttaatgcttcaattacttttttaatcatttttgtattcattttttaaccctctttacgaagttctacttatatattataacataaaaaattacatagaaagcgcttccaagtgtgttttattataaactttacgtttcaatcacaaaaatgaaacaaagaaaaaataattgtaaagaaggaaggactcttttattgtttcgtcatatatatagagaaatagtgcaatgaaaggaaattttccgaggtggagatcgtatttccaatttgagcgcagtaaaagaggtgagaattttgaactttgatattgtaggacaaaaagcatatataaaagatggaccgcatcggaaccgaattggaattgtaaagaaaaacgagacaaaattagcatcgcagtttgctattgtaattggagaacaaatcattgatgtagagctaaaggatatcgtgttagttggagtagacgtaggacaatttcataaatggtgcgaacaaaatggttatttgtgaaaaggacgggctgtgagataatgaaatatatttgaggaaagaggatatgttatcatattctctttttctatgtttcaggaggcgaaaatgaaatataaagaacaggagtttacgttggagttaaaagagaacattcaatgtatggagaaggaaatagagcgaatattacttaaactgcataaagagtatgcgcatttatacatagaaaaacacatggaattagatatgggatttgcaagagaaaaagagaatccctttgaggtgggctattattcatcagttgccatagctatattagatgaagaaaaagagatgattgaatttcactatattccaatttggaaatgcgaaagaatctttttaggaatgtcaattcaatcaaacatttttgggagtaagaaagtaggggaacttgttgatgaatcttgttatgagattgaggaggagttaaaagagcaactagaagaatacttggagtaagaattctcaagataaaatctataaagagggaacggaataaaaaagacgctaacaattgtatgttagcgtctttttttcattatgaagcaatttcaccagtttttgtatcatcttgattgtacgtatcttgatctaattcaccaagccatttacttgaaataagacctgctgtcatagaaccacttacgttaagagctgtacgccccatatcgattaatggctcaaccgagataactagagcaacaataccgattggtaagttcattgtagatagtacgattaaagctgcgaatgttgcgccgccaccaactccggcaacaccgaatgagctaatagcgataacagcgattaaagttaaaataaattgtggttgtaatggatcaattcctacagttggagcgaccatcattgcaagcattgctggataaatacctgcgcaaccgttttgtccgatagataccccaaatgaagctgcgaagtttgcaattccttcggaaataccaagcttttctttttgagcttcaatatttaatggcatcgcaccagcactagagcgagatgtgaatgcaaaagttagtacagggaacacttttttcaaatattgaattggatttaaaccagacaatgcaattaataataagtgaatgataaacattacgataagtgctacgtaagaggctaacacgaagttaccaagttttaaaatagcatttatatcgctaccagcaactgtttttgccataagagctaatacgccgtatggagtaaggcgtaaaattaatgttaccatacgcattacgattgcatatacagcatcaagcattttcttaaatagttctgcttgttctggatattttcgttttacacctataaaggcaatgccgataaaggctgcaaatattacgacagaaattgttgatgttggacgagcgcctgttaaatcaagaaacggatttgtaggcaatagctctaataatttatctggaattgttgtcttttcaatagaagtaaatctttcttcaactagtttcagacgagcagattctgcatcaccttgttgcaagcctgctgcagatacatcaaatcctgcacttgcagcgataccgacagctgcagcgattcctgtagtaagaattaaaattccgataataagaccactgattttaccaaggtttttcgttaactgtaattttgtaaaggctgaaataatagatactaaaataagtggcataacgatcatttgaagtaatttcacataaccgttaccgattaagccaaaccaagtatttgattcaataattattttagaagttggttcataaataaattgtaatataagaccgaatataattccgactcctaaagcagtaaatacacgtttattaaaagatacatgcttacgttgcatataatataatacgccaactaaaatgagcatgactgcaacgttaattccgacaagcagtgtattcatgttgattccccctaattccaatctgttatatagaatataaggcaataaaacccataagtcaactaggaaattccggaattaaaaaaagatggcaaaatgccatcttttaatgtccagccccagggacaagtaaaaacgtcgtgtagtatgtaaatcctatgaagaaaacagttaaatatgccccaaatacgtatatatacatacgctctgttaattttaaatagcttaaaagtacgaagaaacctgtttgtcctaaaaatagtagtgcggtctgttgcatatcccctacgtaaaacataaccgagaaaattccagtccaaaagccgagaacgcgaaacatgcgctccatgccatctccctccttttctaaaaaaagtaaacctcacctcattatagtttatttttcttactattgtaaatattcattcacataaaaagaagccaattattattggcttctttttatgtgagaaattaaattgttagtttataattacaagatttacatccatctaatagactatcatttcgagttaattccatgttagggaataggatttcaaaaattcctttcatcatatctccgtgcatgttacaaatttcagttggatgatgaacagcaacttctttaaatggacaattgtgtacatcatagaaaatttttgttccatctgcacttaattcaaatgcaggtgataagccagctgttgagaaagcttcttttgcaatttgaactttttgttccactgttaaagcatcttcactcacatttaaacgttgcatatgttgttgcattaattcagctccgaattgttttcctgtttcgtatagcgctttctcaccagcagcgccaaggctaagtaaagaattaaatgcgattcttgctaacaattgataatcacggaatggaaattgtaattggataacatcttcagataagacatataatctgctcggtcttccgccttttccagttttcttcgtttccgattttagcatatgaacatcttctaatttagataaatgtaaacgcgctacgtttggatgaatatcgaattcatctgcaatttcttgtaccgttacgtaactatgtttttgcgaaatatatttataaatgtaataacgagttgggtcagataatacacctgtaatttttaaagcttgttccatgaggatctccacctttatcactttatccaagataataacattataatacagataaacattattataggtaatttcagacaataattcggaaattgttcataatttcacaaacatatttttccttttccctctattgaaaatacaaaagtccaaatttttattgcgcatgttttcatgctatatacatagtgaggagggaaaagtgatgaatgggattgaaatttttgcgaatacaattttaaaagaagcgtgtagggtacaagcgtcagatttacatattgtgccccggcagaaggatgtagcagtgcaactacgtataggaaaagatttaatgacgagacagtgtattgaaaaggagtttggagaaaaactcgtctcacatttcaaatttttagcatctatggacataggagagaaacggaagccacagaatggttcgttgtatttgcaaattgatggacaagaagtgtatttacgcctttcaacacttccaacagtatatcaagaaagtctcgttattcgccttcatttacaagcatctgttcagcccttatcacatctttcgttatttccaagtacggcagcaaaactactctcgtttttacgctattcacaggggttactcgtgtttactggaccgactggatctgggaagacgacgacaatgtatgcattattagaagtaattagaaaaaagaaaacacgtcgcatcattacacttgaagatccggttgaaaaaagaagtgacgatgtattacaaattcaaataaatgaaaaagcgggtctcacatatgaaacaggattaaaggctattttacgtcatgatccagatattattttagtcggtgaaatccgggatgaggaaacagcaaaaatagctataagagcaagtttgacaggacatttagtaatgacaacgctgcatacgaatgatgcgaaaggagcaatcattcgtttcatggattatggtataacgaggcaagagattgaacagtctttattggctgtagctgcacagcgacttgtcgaattgaagtgtccgttttgcagaggaaagtgctcaactttatgtaaatcaatgaggcaagtaaggcaagcaagcatttatgagctactatatggacatgagttaaaacaagcacttaaagaagcagatggagaatgtgttacttacaaacatgagactttagaatcgtcaatacgaaaaggatatgctttaggttttttagaagaagatgtttatgtttaagaaaacttggagtttaagtgatcaagtagtattgttgaaacgtttaggagaattattagaaaaaggctactctcttttacaagcattagaatttttacagtttcaattacctgtagaaaagaaagtacaattgcagcgcatgattgaggggttaaaagatgggaaaagtctacacgattcttttcatcagttaaagtttcatcaggacatgttaagttatctattttatgccgagcaacatggtgatatttcttttgctttgcaacaaggaagtgtacttctttataagaaagataagtataggagagacatgatgaaaataatgcagtatcctatgttcttgatgttttttctactaatcatgctttttatttttaacctcattttattacctcaggttgaaatggtttatagttcgttcggttctaatacaccactacttacagaacaaattttaagtgcaataaaactgctaccatacattattttaaccgctattttaactgttattattggatgtagtttatacatgttgtattttaggaaacttccacatattagacaggtaaaaatcatgcttcgtattcctctcatcaaaacatttcttattttaaagcattcacattattttgctactcagttgagtggtttattaaatggtggactatcagtatgcgaagctttaacaataatgatggagcaaagatatcatccgttctttcaatatgaagcgaatcggattgaaagacaattaattggaggagaacagttacaatctatcattgctaaaagtgggtattacgagaaagaactttcttatgttattacgcatggacaagcaaatggcaatttagggattgaattaggtgactatagcgatcttattatggaaaagatagaacgaaaaattaaacatatgttagttatcattcagcctattttatttacatgtattggaggaatcgttgtccttatgtatttagcgatgattatgccgatgtttcaaatgatgaattctatttagggggcatttgtatgcagaatgaggaaggatttactctgttagagatgctattagtaatggttgtcataactatattattactattaattattccaaatgtagttacacagcgttcatcggtccaaggaaaagggtgtgcagcttacgtgaaatctatagaagcgcaaatacaagtatatcaattacaacataataaaattccatcgttaaaagaactggcagatgaaaagtatattacaactgataagtgtccgaatggcgaatctattcatatatcagatgatggcacagtatcaattagggcattgtgaaacaacaagggtttacttttttagaaatgttactcgttttatttgttatttctgtattaagtatagttacgtattttagtgttcattccttatacgagcgacaaaaagttgaacaatttttgagacagttttcaaatgatattttgtatatgcagcaattagcgataaaccatcaaaagcactacacattacgttggcataaagatagaaatatgtatgctataaaagagtcaggtacaaagtattatatcgtcaagcgagagtatgaagaagatatacaaattgatttgcatacgtttccaaatccgatgacatataacccaagtggaaatattaatagaggtggtacgattataatttcgtatagaaattataaatatgaaattgtatttcagcttggaagagggagatttacgtatcgtgaaatgtcaaaaaggatccataatggctgaaatgattgtatcgttaagtgttttaatgatggctgtatcgttactactaccgcaaacagtattagttatgcaagaaagaaaaaatatacaaattcgttataaggcaactggattattaaaaaaagaagcagctatatatatgtatggaaatgaagaaaagcgaataatagaaaagaatataaatggaattgtgtattacacatattggggaggcaatgaagtttgtaccatgtggaaagatgtgaaagacagaatgatggaacaatgcttttatgtaggagaaaaaataaattagaatttggtttttcattaatagaaatgattgtatgtctgtttctattatcaatattttttttgctctttccccgcctacatttcattgaaatggaaaataaacagtcgaaagggttaaatgattgggagtgggatgtgtatttagggcaaatgcaattggagtttcgtgaagtatcatctggagaacagctagcatttgaaaatggagaaagtattttacaattccgatcgcgtaatgggagtgaagtatcgtatgaaaaagagaatagtcgtcttataagaaaggtaaataggcgcgggagggaagtcgttttacaaaatattggaacggtttcttacaaactaacacctcatgtactcattataaatgtgaaagatactagtgggaaaatatatgaaggtgtagttatgcgatatagcgaaataggaataaacgtatgagaaagcaaaagggatttacaatgcctggaacgattatctttcttattttattaacttctttttttatatacgaaacaaatatgttgtttacagataaaaatttttatataggaatagaacaaaaatttttattggatgaattacttaaccgatctattacagatataaaaaaagacttacagcaaaaagaaaaagaaggtacatttttctttcagtatgaaaagggagaagcgagtggaaattatgtctttgaaaatgatttaattctcgttgctttgcagtgtacactcaaacaggaagctttctatacggtgagttttcggtatagaaaaaaggatgggaaaatagtcgattggatagaaggataatatgtaaaatatatatatagataaaccaggatttcctattgtaaattgaattgattttttagaagaaatggataaatataatgattaaaagtttaaattttctcaaaaaagagaaaggtagaaagaatatgatatattcatgctatccaatcattatttttagggagaatagggaaatgacaaacaacaatcaaataggtgaaaataaggaacaaactatttttgatcataaaggaaatacgattatgacagaagatagagaaatacacattatttcaaaattcgaagaacctcttattgtcgtattagcaaatgtactaagtgatgaagagtgtgatgaattaattgaaatgtctaaaaataaaatgaaacgttctaaagttggttcagcacgtgatgtaaatgatattcgaacaagtagcggtgcatttttggaagacaatgaacttacttcaaagattgaaaaacgaatttcatctatcatgaatgttcctgcgtcgcatggtgaaggattgcacattttaaattatgaagtggatcaacaatataaagcacactatgattattttgcggaacatagtagatcagctgctaacaatcgtattagtacgcttgtaatgtatttaaatgatgtagaagaaggcggagaaacgtacttcccaaaattaaatctttctgtacaccctagaaagggaatggcagtatactttgagtatttttatcaagatcaatcattaaacgagcttacgttacacggaggggcacctgtaacgaaaggcgagaaatggattgcaacgcagtgggtgagaagaggcacttataagtaaaagcgagtgttacgttttgttcttcatagtataagaacaaaacgtttttttattaaacaaagtagcatctttcgttataataacaattaataaatgacgattgagaggacaagaaatgaaatctatatacataaccggctacatgggagcagggaaaacaacaattggaaaagcgttaagtaaagaacttcaaatggatgttgtagatactgatcaaaaaatcgaagagaagcaagagaaggcaattcgaaaaatttttgccgaagaaggcgaaatggcttttcgggaatatgaaagcgaaatgttacgtgcgctaccagtccataatgttattattacaactggtgggggaattattgaacgagcggaaaatcgcaagtggatgaaagagaacggaactgtcgtgtatttatattgtgatccgcatgtaattgcagaaaggcttcgtgaagatacgacacgtccactatttcaaaagaaagatatagatgcattcgtaaagaaatttgaatcacgccgagcttattatgaagaggctcatattcatatcgatacgacaaataagtctgtaaagcaaattatgaatgaattaaaggaaaagattaatgtataaaaaagtggacatactaatcaagtagaggtgatgataatatgtctactaatgattatgttcgctttgtgacgcagcagtttgtgtcgtatatggatgctccaaaagaagatcgaaaacaaaagaaagaacaacgccgtgctgaaaaagagccatttatgaataagtggtttggtgttatgccgctgagtgctgctttgttttaccgaaatgtaaaaagtaaaagaaaaaaatcaagttaaattttagtcatatgtttaacaaaccaaaaatcccctagtgtcgtattacactaggggatttttatttactgcacggattcttgttcttccgtaacggcatgtattttattatttacccaaacaaatccaattccgatacaaatggaaatgccccatccaacagcggtcataatcgctctcatttcaccatagccatctacaccgaaaacagagatgaaataaatttttaagaagctttttaatatgaattgtagaccgaaaaatagcgttaaatattgtagtgctggataaatacgactatcacgataaagctcacgacttttatcacggtcatggccttgcagtgcggcaatatccgcagcgaaatataacataagtggtttctttataaaaattgtacatatgacgataataccgagtacgatgtgataatatgcatcattccacaacattcgttcagctgacccagataataaatctaccgttgtattagaaatgagtgtaattaaaataaagaaccctgtcacgttaaactgtttttcttttttaaaggtatacagtgtataaataatccccggaacagaggaaagtaacatcgcgtaataaggatcgatataaggttttgcaaatttccaaatgaggaatgggattacgagataaaagacaagatctaatatagcttttttattttgattcatacaaagcctccttaagtcatacatatattttataatataatttctgaaaattgtataaggtttaatgggaaaagaaaaaatatatcaattttcgaggggagagtagattgaaaaaaattgcccctagcgtagtaagtttttttagtatataataaaggaaacgctttcatttttaatttgttcacaaaatggacggaaaatcacatatttactatcgatatgttgctttataatgaaactaattaaatatacatgcatacaatattgtgaaataaataacataaataatctatataaatgtaaacgttatcaaaatagagaggtggagacaatgagtaaatttttcttcaatcataatccagcaacagtagaggatggaaggcttgttaaatatgctgaaattatttatggagaaggtggccgttctgtattagaaaatttaatggtgaaggcatctatcagattgcgtgatcgttatccgaataaatctgacgagcagatctcgaacctagtaaataaaggcatccatgatatgtttcaaaaatatgtgagcgagtaagagtggccaatggctgctcttatttttttgtataaggattgtaactctagctgaaaataaacatgtattctgaaaaacgtaaaaaggagtgggaaagatgagcaatggaattggacgttcgaaagaaaatcttccaactgatgcaaatcatgtgagcgcgaaggatcgtgcgtatcaaaaacgcatggcaaagcaaaaacaacaagagcgtaatgaggatagagaataactcgaaataaagctccttctaaagcagaaggagctttatttcgatagaaaatgattcgcggtaacataaaagagtccaccgttaataatttgcactgtaatacgtggttcatactgttcttgcagagcttgtttttcaatttcatagctctcaggaagttcgtcactttcttcataaaaacggtttaaaaggtctaaatcatgattccaacgcactcttgcttcttttgcccacgtatggtcatcttctgcaattatattttttaaagcgtcttctatgcgttgtaaaccactttgaggtttaatgatgggcgagagcgtaaaacaaaaatcaggtatttttggtgtaagtttaatgtttgttaatgtttcatgaaagtttgccatcattgttccagaaatgagatgaataccaatcgagtgaaggatgtctttttttcgatcacattgataggaaacttttatattaataccgagccaagggtggagcggtgtatgtgttgacccattatgtcttacatcctcatataaacgtatgtatgagcctaattcttttgtcgtttggaaaatttgatgtagacgtggtgaaccgtagtgaataagctcaccatcattttcttcattttctggatttgtaataagagtaaggcgcatcggattcggtacgcctcctgttttctcaagatagtgccaataaaaagggcgattcattaataatttatccatctcaattgttaactgtacatctaataaatgaggagaacgttctaaaatttcacagttattcgcctcaaagaaattgtataagtaattatgaatttcatgttgctgcatagccttgcacctcagcttcatttcgtttcgcaaagtcgataatagatgttaagttttccatcttaattctaatttcaccttcgctctttgattgcgcgaaaatttcttgaatgtgcgcgtcgatgtttttcatattaattctcgttaaaatttcatcgagttcaccaataacacgctcgaataagttgattttttcatataacagtttcagaatatgttcttcaacagtatgctttgtagctaagttataaatatgaacatcatttttttgaccgagacggtgaatacgtccgattctttgctcaagacgcattggattccatggcaaatcataattgatcatatggctacaaaactgtaagttaatcccttcaccaccagcttcagttgcaattaatacttgtgcgtggttttggaaaagctccttcatccaatctttcttcccgcgtttaaacccgccgcggaatggaacggaagaaataccgtgttgttgtaaaaaccattgtaagtacatttgtgacgctcgatattctgtgaagataacgactttatcgtcaatttcttttataagctcaagagctttatttgcttttgagttgaaaggaatatgattaattttgtccattagcacatcgatatgtggatcttttatataatgttcgttttctttctgttttttttctacatgctttttcaatgaatagtaaacagcctcacgactactacacgcttcccgttttaaagttaacgatgagaaagcagatgtgaaggcgtcttgtcctcgccaattttcgatatcattatatagagcttgttcttgttcattaaactcaacaaaaattgtacgtacatgtctcttcggccaatcgataccggtattatgtcgtctatttcgcaccattactttattaatgagagcttttaagtcttcatctgattcggctgagcgatttttggaagcgtaatattcttcaaagttggattgattgcctaaatgtcctggttttaataaagaaacaaggttaaaaatttcatcaatcttattttgaacaggagtagcggttagtaataaacaaaacttcttttttaatcgttgtgcaaattcatagttttttgttttattatttttcagtttatgtgcttcatcgataataataaggtcatattccaagttcaacacgatatcgcgatgtggtgaacgtttcgcagtatcaattgatgatacgattacgtcagcttgttcccatgagtagcttttcttttgtgctacagcgggaatgaaaaactttgtattcagttcgtatgcccattgtgatacgagagaagctgggacaagtataagtacctttttcacaagcccgcggaccatgtattctttcaaaataagtccagcttcgattgtttttccaaggcctacttcatctgctagaatcgctttaccgttcatttgttcaatcacattttgagcgacttctaattgatgcggaagcggtgtgaaatgggataaatgtttcggtgcttgtagtccatcaaaagtaggaacaagtaacgatttttctgtttcataagctaagtgatataaatcccagtttgtccaaggaccatcttcgtcaattctatttaaaaaattgttttgccatgtccgatctacggaaatatcgacattcattacaactctcccaccttttataaactaaagtaattattttttaatgtatgatgatttgccttaaaagaaggcataattatcgttattaaaggctatatgatagacaataataaagtattaaatctcaaaagctgtatttattgtgttttaacataaaaaattctaaattattttttatgctagaatattgatgaaatatagcgaatgatgttaggataatggtgtgaaatgtgtggaatctttcgtattttatccaagaaagtgattttttatttacgctttcataaaaaaatataatgagattccgtatatcctatcttttcagaatgaaaatgtttagaaaagggaagcaacttttattgatttgtcaaagcataagggggagagagcatgattacattacaacgtacaccgttatttgatgtatacgcgaagtatggtggaaaaacaatcgacttcggtggttgggaattaccagttcaattttcaagcattaaagaagaacacgaagctgtacgtacagctgcaggtttgttcgatgtgtctcatatgggagaagttgaagtaaaaggtgtagatagtttagcatttttacaacgtgttgttacaaatgacgtatctaccttaaaggtagggggcgcacaatatacagctatgtgctacgaaaatggtggtacagtagatgatttattaatctacaaacgtggtgaagaagactatttattagtaatcaatgcatcaaatatcgagaaagattacgaatggttagcaagtcatgtaattggcgatgcgacagtagtcaatgtttctagtgaagttgcacagcttgcaattcaaggaccaaaagcagaaggcattttacaaaaagttgtgtcagaagatttgaaagaaattaagttctttaaatttaaaaacgatattcttgtagatggaattccagcacttgtatctcgtacaggttacacaggtgaagatggattcgaaatttactgtaagagtgaagatgctgcaaaactttgggagaaacttcttgaagttggagcagaagagggcttaaaagcatgtggtttaggtgctcgtgatacacttcgattcgaagcaacattaccactttatggacaagaattatcaaaagatattacaccgattgaggctggaattggctttgcggtaaaaacaaataaagaagcagacttctttggaaaagcaacgttaaaagagcaaaaagaaaacggtgcgcctcgtaaattagtcggcatcgaagtaatcgaacgtggaattcctcgtacgcattaccctgtatttattggtgaagaaaaaattggggaagtaacgagtggtacacaatctccaacgttaaagaaaagcattggtttagcactaattgatgtaaaatacgcagcagttgatacagaagtagaaattgaaattcgtaataaacgcgtcaaagcagtagttgttccaacaccattttacaaacgttcaaagtaacggggagaggggtagatttcatgttgcatcgttatcttccaatgacagaagaagacaaaaaagaaatgttacaaacgatcggcgttcaaacgatcgatgaattattctctgatattccagagagtgttcgttttaaaggggatttaaaaattaaagaagcaaaatcagagccagagcttttaaaagagctatctcaaatggctagtaaaaatgctaacttaaaagaatacgcttctttcttaggagcaggcgtatacgatcattatgctccagtaattgtagatcatgttatttctcgctcagaattttatacagcttacacaccataccaaccggaaatttcacaaggggaattacaagcaatctttgaattccaaacaatgatttgtgaattaacaggaatggatgtagcaaactcttctatgtatgacggggggacagctttagctgaagcggcaatgttagcagctggccatactcgcaaaaagaaaattcttgtatctagcgcggttcatccagaatcaagagcagtacttgaaacgtatgcaaaaggtcaaaatcttgaagttgttgaaattaatcataaagatggtgtaacagatttagacgtattacaaagtgaagtagatgatacagttgcttgtgtaatcgttcaatatccaaacttcttcggacaagttgaaaaattagctgatattgaaaaaatcgttcatcaacaaaaatcattatttatcgtttcttcaaatccattatcattaggcgcattaacaccaccagggaaatttggtgctgatattgtaatcggtgatgcacaaccattcggtattccaacgcagtttggtggaccgcactgtggttactttgcaacaacgaaagcatttatgcgtaaaattccaggacgtcttgttggacaaactgtagattcagatggtaaacgtggatttgtattaacgttacaagcacgtgaacagcatattcgtcgtgataaagcgacatctaacatttgttcaaaccaagcgttaaatgcactagcagcttctgttgcaatgacggcacttggcaaacaaggtgtgaaagaaatggcacgtcaaaacatttctaaagcacaatatgcaaaacgtcaatttgaagcgaaaggcttcacagtaacatttgctggaccattcttcaatgagtttgttgtagattgcaaacgtccagtgaaagaagtaaacgatgcattattacaaaagaatattatcggtggttacgatctaggccgtgattataaagagcatgaaaaccatatgcttgtagcagtaactgagcttcgtacaaaagaggaaattgacacacttgtaaacgaaatgggggctatccaatgaagaaccaagaccaagcacttatctttgaagtgagtaaagaaggacgcataggatatagcttacccaaattagatgtagaagaagtgaaactagaagatgtgtttgagagcgattatattcgagtagaagatgcagagctaccagaagtatctgaacttgatattatgcgccactatacagcactttcaaaccgtaaccacggtgtggattctggattctatccacttggatcttgtacgatgaaatataatccgaaaattaatgagagtgtagctcgtttcgcaggatttgcaaatattcatccgttgcaagatgaaaagacagtacaaggtgcaatggaattaatgtacgacttacaagagcatttaattgaaattacaggtatggatactgttactttacaaccagcagctggtgcacacggagaatggacaggtttaatgttaattcgtgcataccatgaagcgaatggtgactttaaccgtacgaaagtaattgtgcctgactctgctcacggaacgaacccagcatctgcaactgtagctggttttgaaacaattacagtaaaatcaaatgaaaatggccttgttgacttagaagacttaaaacgtgttgtaaacgaagaaacagcagcacttatgttaacaaatcctaatacattaggtctattcgaagaaaatattttagaaatggcagaaatcgtccataatgcaggcggtaaattatactatgatggtgcaaacttaaatgcggtattaagccaagcacgcccaggagatatgggatttgacgttgtgcatttaaaccttcataaaacatttacaggtcctcacggcggtggtggcccaggttctggtccagtaggtgtgaaagctgatttaattccgtacttaccaaaaccgattttagagaaaaccgaaaatggttatcacttcaactacgaccgtccagaagcaattggtcgtgtgaaaccattctatggtaacttcggaattaacgttcgtgcatacacgtatattcgctctatgggtccagatggattgcgtgcagtaactgagtatgctgtattaaatgcgaactatatgatgagaagattagcgccattctacgatcttccattcgatagacattgtaaacatgaatttgtattatcaggtcgtcgtcaaaagaaacttggtgtacgtacattagatattgcaaaacgtctgcttgatttcggttatcatccaccaacaatttacttcccattaaatgtggaagaatgtattatgattgagccgacagaaacagaatcaaaagaaacattagatggtttcattgataagatgattcaaatcgctaaagaagtagaagaaaatccagaagttgtacaagaagcaccgcatacgacagtcattaaacgtttagacgaaacgatggctgcacgtaaaccagttttacgttatgcgaagccagctcctgtacaagtttgattaaaataacaaaagaagaactcgctgaggcgggttctttttttgtatggataatttgtcccgcattaacggacagtaaactctcaacttaaaacttagctgctgcaaagaagacaggtgggagataaactgtccgtaaatgcccgattggttcaactaataatcagtggggatgaacaaaaatccccactgattaaagtttcactttatgcagaaatagtgaagaaaatgttaaaaaaatatgttttttgtttcctaatggtgtaaaggtgtagttttataggtagttttgttgaaaaagtcggtttgataaaagtatttatttttgttagaattttattgaaattaagaagatgtgatgaggcaaagattactcatttttatgtatatgtgaaaaaacgaacaagacgggggtgaaagtgtgggatatcgatgttatagaatggtataccatttagaaaatggagaaacaattaaagatgtaaaagaattttgctatcgagaccaaggaaaagtgttagaaagagtagcaaatcgtgtaatggataatagagaagtgacggcgattgataaacaaggaacaatcatttcaatagcatgtgaggacattgtaaaggtggaacttgattacataacagaaagttaaccttgagtcatatcgaattattcgataaaataaactgttgaatggtgaagtgagaagagaggagtttatcatgggtagtacaagacacttttatatgtttatcttagcgtttgttcttgttgtggcattaacgatttacttaatcgttgacagcagctggtacaacacagttcatccggcattccttctgtttatgtatataggaattgcagtagtaagtttcggaatgagagacgagatgttagatcgctttgaaaagtgatacatatacgaaagaccaacaggaaaatgttggtctttttttcttgccaaaaataggatggtgtgtatatactgtatatataaggtatacacagtatatacacaaactggaggaaaacatgaatattattatttcgaattcttcccaagaccctatttatgtgcaaataagaaaacaattaagccagcttattttaaatggcggtttaaagggtggagatcaattaccgtctattcgtagcttagcgaaggaattacaaattagtgtcattacaacgaagcgtgcatacgaggagcttgaaaaagaaggatatatagaaactgttgctgggaaggggacttatgtttcacgtaaaaataatgaactattaaaagaacaaaggcttcgcctattggaaagtaaagcggaagagattgtgaatgaaagtaaagcgttgcagctttcacttgaagaattacagcagatgattgcgtttttatataagggggaatgagagagatgttagagttaaaaaacgtttgtaaaagttatgaaggtttcgcagtgaaaaatataagttttacgttaccacgcggatatattatggggtttgtcggaccgaatggggccgggaaaagtacgacgatcaaaatgattatgaatttaattaaaaaagataacggagatataaaaatttttggcaaggacaataagaaagctgaaaaggaaataaaacaaaatatcggctttgtatatgatgaaaatcattattacgaagatttaacgtgtgaacaaatgaagcgtattattgcaccgttatataaaaagtgggacgaagagcagtatcaatcgtatatgcatagattacaagttccaaagtataaaaaaattaaagaattatcaaaaggaatgaaaatgaaatttgcgattgcaatcgcactttcgcaccacgcagagtttattattatggacgaaccgacagcagggttagatccagttgttcgaagtgaattacttgatatgttgcaagaaattgtaatggaagatgaagtatccgtattattctcaacgcacattacaacagatttagagcgcattgcagattatgttacgttcatcaatgatggagaaattatatttactggtgaaaaagaagacttaatggagaactacgtaatcgtaaaaggaagtaatgatttattagaccgagaaggaaaagaactatttgttggattacgaaaaaataagtttggttttgaaggtttagcgaaggataaacaaggaattatcgattggtttggaaatgaggttgtactagaaaaggctacattagatgacattatcgtttacactgcgaaagggagaggtgtctatgcgtcagctaatctataaagatttgttcttttttcgggttatgtggttagtgtattttattatgcctcttgttttctttggattagatccagatggtgaattgttatttccaatgagttgcttactcataacgatatcatcttctatgatactaatagcgatggatgaaaaaaataaaagtgatgttattataaatagtttacctgttggacgaaaggatatcattattgctagatatatttcgggtgtaatatttattgtaggtggcatgatttctactacgctagttgtttttcttataagaggtatcgctgtcattggtgatattggagcttatcatcccaatttgtatattgaaattccttggtatgtagtagtcagaggtgctgtatattctttagtttatattacagcattattcccgagttattatgggacaaaatcaaaagtagtacgtggaatatttacaggtggagccgctggaataggtgttattgttggaatgtttattggtgacggagaaagtgctacggcatcattcattgattggattatgaatccattacattttggcatatttatagttggattaatcacactagctagtgtctatatcgtttctatgcttcttacaattaaaatttatgaaacgcgtgatttatagagaggagaattcatatgcaacagttgattttgaaggagttttttttacagaagaagatgtttcctttctattttttaatccctattttatctatttttaagaattccgtcgaaccaatggggattgcaataggagtatttataacatgtagtacgattatatatatttctttttattatgacgagaaaagtaaagcagaaaaagtattagtgagtttgcctataacgagaaaagagataattatagctaaatatatttcaagcacattatttattatggctggtttgagtgtaacttttatagtcgtaatattaggaaatattttattgaacagagatatagttatgcctggatatgcaatattttcagcaatagtagcaactttgatttattgtgcagtaacgataccgactaattacattgggggatataaagttattactgtcttgaatttgattatgctttttcctttaatgggtatgattggtcttatgtgcaatatttttggtgataaaacaattatgttaaaagtacttcactctcaagaggctacacaagcaatgggtgttcttggtgtcggagtattagtgagtatattcgtatcattgttcctctcaatgaaaatgtttcaggaggcagagttatagaagggacattttcatattaggaggtgtaatacatgatcaagcaactaattttaaaagatttcatcattcaatggaaatttttaatttggtacatactgtatcctgttttcttttatatggccttaacagatacggaaaatttattcatcattatgtcagtaattattacaattggggcaacagtaaaaacatttgaagcagatagtaaaaatgagagtgaagttatagtaaatagtttaccaatattgagaaaacaaattgtgtatgcgaaatatatagtagcaattattattctttttataagtgtaacggtcagctgtttcacgatgggaatgaagaatgggattaacctatttgaatttattgaaacgacattgcttgctagtattagctttattttagtgtatttaagctttgttctaccaatatctttttggttaggatataaaaaaactattcttattacaatagtaatattcatggcgccgattgttattttagaaactttgtttcaaatcaacttggaacaaattcaattatataataccttgttattcattggttcaatatgtatgctcatagcatctatcttcgtttcagtgaaattgtatgagaagagagaattttaaaaggtgccctataaaaggcaccttcttcaataacgacaatacgagagcagtagtttataaaaagaaacgctatttggcacatctttcggagtatgtaatataaagctgaaaacgatgatgagaataagaaataggaaaaataaaaataggatttgcttatgtatagaattttgcatattatccactcctttttttgggtagtatgtccaaaagaaaggaatgtatgaaaaaaattggagggggaacaatggggaaacgaaaattgttatttgaaataggagtattatttttgtcaataggtcttttgttatcaaatttttattcagacataccatcaccgtttcctaatttgcataaaggaattggtataagtattgttataattggtctgttttgtcttatcacatctaacttctacagaaagtctgaatgaatataaaaaaggacagttactctttttcagaagtactgtcctttttaaataacttattccatagtttggcgatactccatataatgacgattgcaatggaggcgataatggaccaaacaatcgatataatttcaagtgtcatgttaggaaggaatgtgagaatggataatactttatgaaacaatgattctattatatgaaaacttatttgtaatagaatgacgatacaaagtgtgatccatgctaatattttctttccttgttctttccacatgacattcacctcacgttagcttaatagttttaagccaacagcgccgcataaaatgcagcttaagaaagcaagacgacgccaatccgctgattctcggaaaatgagaatgcctagaagtgcacttccagcagttccgattccagtccaaattgcgtaagcagttcccatcggtaatgtgttcatcgcaagagataagaagaagaagcttacgccgaagttagcgattaaaataacttttggtgcccagcctttcttttcagtggctactttcataaagagtacaccaataatttcacaaataccagctagaattaaaaatacccaagccattttatgcggcctccttcgcttctttttcttctgttactcgttttaaaccaattactccgaagaagattaaaccgattaataaaacttttacgatagagaaaggttctccgaagatgaaaatctctgtaagaacgattccaccagctccgattcctgtaaagactgcgtatacagtgccgacaggtaaatctttataagctctaaataataagacgaaactaattgtaattaatagagcaacaccagcccattcaagtggtgcctctgctttttttagtccaatcacccaaaagatttcaataataccagcgatgattacataaatccatgccatatgtcatttctccttcctaccagtcgttaggtaaagggcttaaaaacgacgcattgcaaagggcaatccgtcagtttgaaagtccgcgccaaaatactttccaagaagcgtctaaacgtgtctcaaaacgatttaaacctgcgtataatagttcaaccataagaccgtcgagtaagcatagaaaagcctctaaggcgtcttttacttcaatgttatgcagctcatcttgttcgcttgctcttttaaatacagggaataaaagttttccgacgttttcaatgtgtacatttgctttattaataatttgttcgcgaaatgcatcaggcggaaaataagaagttcgtaaccaaaacattgattcttcactttcaccaaatcgttttgcatacccttttaataattttaaaagcaattcttcagtggacgaattggaaaagctttcgatatcgcctgtgaagctctgcaaatctttttgaagagcagattctaagcatatgaaatatagctcttcttttcctttaaagtgtgcgtaaatcgatggttttttaatcccaacttcttgagcaatatttgccaatgaagttccttcatagccgtagcgtgcgaaatgagaaagtgctacagctttaatgcggtttgctgtcattttcatcccctacctaccgttcgttaggttaattatatgagatgaaaaatataatgtcaataggtgaagagttgaaaaagagcgttataggtaacgctctttttagacagtctctcgctcaattaaatggaatgaaagttcttttgcactgccgacaatttgctcgctttggatctgcttatggaataaagaaaaagcatgtgagcccattgcgagaccgggatgttcaattgtggaaatttctaatgcctttgaaatttcatgattatcaaatccaaggatagcaaggtcttcaggtactcgaataccatgttttcgagcctctgttaataaaccagctgcaacttgatcgttcgctgtgaaaatagcagttggacgatttttcatatttaaaatatgatggagtatttgtgctccgtcctgcattgtatagcattggtggaaaatccattcaggatgcaacgttttcccttcgttacgaagtgtatcggcgaacgctttttcgcgctccatggaatttacacttgtttttcttgctaaacaaattccgattttttcatggcctctacttagtaaataggcagtaccgagacggaaaccttcataatgatctacgtagatggatgaaatgaggggatgcttcattttttcacatgaaataataggggcaaattttgcaaaaggttcgatttgttcccaagagctcgttcgggagcaaataatcatcccatcaaattgtttcattttcatcatttcaagaacacgaatttcttcaatgctatcgtaattcgtttgacataaattaatgtgatatccggcagctaacgcttcgtttccgattccttcaataatcgtactgaagtaggggaggttaatgaaaggaagcataacgccaattgtatatgttttccctcttattaaatggacagcatttatattttttgcgtagtttaattcttcaacagcatctagaacacgcttacgcttttcttcttttacgtaagggtgattattcaggacacgagaaacagttgatatcgatacaccagcagttttagcaatttgttttatattggccatatgtatcacctctttcccttattataaagggaaaataataagaaagaaaaaatcttgacctgaaaagcttttcacaaactatggtattaataagacttctttttattcgcgtaaccttttcacttgggcgtaagaatgataggggtcttttttgtttgcaaaaagtgttgtcaaaatgtgtgagaataacgtggaaagttttcaaaggtggagtttggtgacaaagcgaatatgaagagaatatcaacgcttcgttcgttaagagagcggtatgaaagggcggaaacaaattgaaaaaaagaatcatttgtttcgtgttttctagtttcatgcttagttcgtgttcgtttcagcaaacgatgcaagaagaaaaacactttgtgggaacaacaggaggagctatggatcgtgttacggatcctattccgctaaaggaacttccaaaatattttccggtgaagtttaaagttccaacgtttttaccgtacgacattacaagtgatgtgaagggggaagtaagaacgcttgggaaaaagaacattgtcttaacgattaaatataaacagaaggagtcaggtagaaatgagtatattgagttaaatgtcgcgaactttccttatagttttccggatcttgtggaagagaagcgatttcaagaacaaatgaaactgaataatggaacgtctgcttattttaaaaataaagatgattatgaacgtggtgacgaatttgctacgcttatatggaaagagaaaggaattgaatatcaactgctgtatcggaatgtagaagagaacgatgaaaaggtaatcaagcagaatttattatacattgcgaataagatgaaatgaaaaaactagctgatttattcagctagttttttgtatgttattatttctttttaattttgcctgtccaagatttaaatccaccttgtaattggtagaaatctttgtagccttgtttttttaagtattgcgctgcacgacctgtacggaatccgctttggcaatataagtaaacaggttgatcttgacgaagttctttatggcgaaggcgaatttgtgataacggaatgttacgtgcacctaaaatatgccctgcgttatattcgtctgcttcacgaatatcgataagctgtgctttacggtaaccagcgcgaaattcttcttctgtaagagttttaattaattttttctgatagaagtacatccatacagtgtagccgataaatgctacgattacggctaataaaataatccaagttgttgacacgattctatcgctcccttttttcttatcctactttcaatattataatgcccttatgtatttatgcaacagattcatttgcatataagaagaaatttcgtattctttcacaaattttgtcgaatttggtagactagagaatgtgaaaaataattggttatatgaggtgcaggatgggaaaagaaaaatggtgttatattaactctggtcaatgttcaccggcatttaatatggcgttagatgaatgtttattaaattggcaaagtgaaaagaaaatgccaccaacaattcgtttttatgaatgggaagtaccaacattaacagttgggtattttcaacgtgttgaaaaagatattaatatggatgtagttaacgaaaagaaatatggattcgttcgtcgtcaaacaggcggcaggggtgtactacatgacaaagagttaacgtatagtgttattgtgtctgaagatcatccgaatatgccgaaaacagttacagaagcgtatcgtgttatttcgcaaggtttattagatggttttaaggcattagggttagaagcatattatgcagttccaaaaacagaagcagatcgtgaaaatttaaaaaatccacgttcaggcgtatgttttgatgcaccatcttggtatgaaattgtagtggaaggacgaaaaattgctggtagtgctcaaacacgtcaaaaaggtgttattttacagcatggatcgattccattagaaattgatttagatgaactatatgatctatttttattcccaaatgaacgtgttaaggaacgtatgaagagtatgttctcttctaaagcagtagcaattaatgaattaacagaccgtacatttacgatagaacagttaattaaagcgtttgaagttggctttgaaaaaggattggatgtagaacttgttccatatgaattaacagaagaacagttacatgaagttcaaacgttagcgaaagaaaagtatgaaagtaatgagtggaattataaaaaataagaggtggcgatagccacctcttatttttttatagtaaattaagtactttttctactttgattcctttatcttgtaaagaacgaaggcgacttacaacgtccataatttctttgtcaaatgtaacgctaataccttggctttgtagttcttcttttaagctttcaatagaatcatctatgtcgatgccaagctcgtaatcttgacaaacttcaattgtctttttcacgagtttaacataattttcttgtagttttgaatttgtttcagtcaaagcaggctgcttcggttttgcaggagcaaccggtgctgtctcttgctttgtaactggagtagggactgctttttttacaggcgctggagtaactagttctacagctgcttctacgcttactggcttcggtgtcggtaccggagtaggcttaggtgccatagcaggtgtttccacacgcgtaacaggcttaggagcaggcgtaattgcttttggagcttctacaactacttcttttttcggtgctgcttctacctgtgtttcttcttgctcggcagcttctttattttctttactccacataacgcgttcaatttctagagaaacattgtttttgttcatcgctgttaatgtaactttaccaacttcagcgtttccagtgaaatcaacaattttataaataacactcttgttccaatccacgtttccgctcaaaaataattcttcgttacatttcggcgttaagccctcgattttaatttctgcgtttacaccgttttcactatataccataattagcgaagcatttacatcttcgtctgctaacattagttcacgtaccattttgccggtgcgtacttgcgttttcttcttaactgacatctaatttctcctctcaaaaattcagtaataataaaaaaatcgtataacgaaaaataattgctcacgaagatttatgataccgataataaaagcatcacgtcaacaattaactttaattattttgcatttttcttattttctttatgaaatttttcaatttgtaaaattagacagaagaaaaaacagccttttgaagggctgttaaaatttagatgttttatataaaaatttgtacaaaatataaaaagaaagtgtaataagagcaccttgcaaaatagacaagttataaaataagtatggttttgttttgaaaaatacgtttgcaaaaactgataagacaaaaggtataaataccgataataagagaagtgctttttgtttccaggaaactaatattgtaaaagagaaacgtctaaataaagaaaaagttatgaaagcaccaattgttaaaacaatagcagataatattgttccgggaatactaaatggaattcctgaagtgtttgtatttgaaaatagtttttgcataagagtagtgaatgtatcgtatccaatttgaacagctaataataaactaactgcaaacccaataacggcagcttgttggaaagaattttgatgttccgaagagttaattaattcatcgcagtaagcttttaaatcctctccgaaaatatcatgcgcagttttaccgtcttcttgcgcttctaaaagatgatccaatatttctaaaagtaattcttccatttgtttttgtggaacgctagtaaggcgtaaataaataagcatatcaccataagcagcttcgttttcaggtgttaataactttctttttttattgtttaactgaaccatttctttttcagtcatgacctcgtcactcctttttaaagtccaagtattcttttttgaagaaaagtttatatagtacatagcaagagatggcaagcaaagtaccggtccaaggtgaaacttgtaatgtagtatagggattttttataaataaaaaggaaataccgattaatagcatccataggctatgacgtattaaaaagcttcctatatgcctccaaatagttgttttatttttaaataaatcagtgttaataaaatcgaagacaaaacgtatcataagatgtacggataatgtaaatacaagcagataaatgaaatcaatgtgtacaaatttaaaacgtgctttatctgcaaataagggtaatacaaatgcaattacggacgaaatagcaaagtatattgctagcaggtaacaagttataaataaaggaattgataattgttcccataaactttgcttcggtagggcggcaattaactcgtcacagtacgcctgtaagtcgtctccaaaaatatcataagcatttttttcttcttgctgggcttcaataaggtgatctagaatttcaattagcagttcttctgcgtggtattctggcactttagctaagcggatgtatattaacatgtcactataggcgatttcattttctgtagttaataatttacgcttttggttatttaattcgattaaatctttcgccttcatccccatcactctccttgtaataaattgtttacggtcgttgaaaccatcccccagctttgtttaaattcttcaagctgttctaatcctttatcggttacgtgataatattttcgcttcggaccgagtgaggaagcttttaatgtgccttcgatcaatttttctttttgcatacgtaataataacggatagatgcttccttcgcttacgaatgtaaagccatgtttatttaattttgtgctcagttcatatccgtacacttcttcttgtgaaatgatgtataggatgcaaccttctagtacaccttttaacatttggctgtgcatgatttcaccaccttttactcaggtaacttgcgttgcaaggtagctgttatccaaattataacccccagtaacttgcaacgcaagttactggggggaaaactttaatgtcccccatactaacgagagggcgaaaagcatatgagaccatttatgccaaagctcgtttactttgaacgaaaggcacttgaatatccacttgattttatagttgcgccaatttaaatgcatgaagaatgggaagaaggaaccgtaaactatttgagcgacaaagatatgacaataccaaatttaacgtttgaattgattcagcatcgttttccaaaaccatcggaaaatatgtatataaaaaggatgatgcagcagtattggaagaaacgataagaggttatataaatgagttttttcctaatgcagaaatacaatattttacttaagggcggtctgtatgcaaatacagattcttttttgttttatatatttaggctcgttttcaacttgtcacgttattctttctggtgtatcattttattgattgcttcgtacggaataagcaaaatgaacttggatggaggaaaccgatgcctacccctagtatggaagattatattgaacaaatttatttgttgattgatgaaaagggttacgcccgcgtatctgatattgctgaatcgcttagtgtacatccatcctctgtaacaaaaatggtgcaaaaattagacaaagatgaatatctaatttatgaaaaatatagagggcttgtattaacaacaaaaggtaaaaaaatcggagaacgtctcgtatatcgtcatgacttgctagagcaatttatgcgtattatcggtgtggatgaaagtaaaatttacaatgatgtagaaggaattgaacatcatttaagttgggaagcaattgatcgcattggtgatttagtggaatactttgaacaagatgcagtccgagtggaaacacttcgtggtgttcaaagagcaaatgaagagaaaagtaattaaggggaacgtatggcgtttccttttttatttcaattcgaaaaggatgggagaattatgaaagcaattatttttgattttgatggattaattgtggacacagaaacgatatggtttcactctttcagagatgctgttcgtgaatacggcggggaactacctttagaggaatttgcgaaatgtattggaacaacagatgaggtactttatacatatttaaatgatcaattaaaagagaagtttaacaaaaatgcattaaaagaaaaagtggcaactttacataaagagaaaatgagaataccagaagctcgtgacggggtaaaagaatatttagaagaagcgaaagaaatgggattgaaaatcgcactggcttctagttcgtctagagaatgggttattcattttttagaagagctacagattcgagaatattttgaagtgattaaaacgagagaagatgttgagaaggtaaaaccagatccagctctttatcgagttgcaatagaagaattaggaattaagccgtctgaagctgttgtatttgaagattcattaaatggattgagagcagcagttgcagcgggattaacgtgcgttgttgtacctaatgatgtgacacggaatttaccatttgaaaatcatcatcttcgaattgaaagtatgagagagaaaagtttaaaagaagtgcttcaaagtataaaaaaagaccgtatttcctaaaaggaagcacggtctttctttttgctttttttgccttcaatgacagttaaatgagactgttttctttttcgtttcaaagtggaagaattcccttttttacttttgtcattagaagtatttgacttaaagaaagaattgcctaggggtgctacattttgtttcccatgtttgcggttcgattgttttgccgcacgcttatatgagctttgtgaatttgcagaaccactggaatttgtaaacatcttgtatagcaagtaaaagataccaacaacaagtaacatgtacccgatatttcttaatacacccatgggatttgtaataacagatgaaacaaggccgaatattgccaatccgataataagcacaaatatagcgaaagtaaacgaacgaccgttcataagggacacctcctaaaaacgtatattaaaattagtatattaacgatgaggaaaggagttgaacaccatttttaaataattattgtttgttctctaaacgtaataattcttcaaacgatgcaattgctacttccacttgatcatctgttggttctttcgttgttaatagttgtagccataatccaggatatccaagtacgcgtaatacgggaatatctcgtaatcgatttgtgaattgtagtacttcaaaagaaataccaagtacaactggaattaataaaattcggtttataactcgtgcccaaagaggatctgtagggactaggaaataaacgaacattccaataatgactgtaaatataataaagctactgccacatctataatggagacgagtttgcttttgaacgttttctacagtcagaggaaggttattctcgtaagcattgattaccttatgctctgcaccgtgatactgaaatacccgcttaataagtggggttaaagaaataaagtatatatagctcaataatagcatgagcttaatgacactttcgacaatgatttgcccagtatgagacgggaaaatcggtcttgttaattcagctaatagtgcaggaactgctgtgaaaatgactttaccgaatataaaagataaaacgccaacagctgcaactcctaataccatcgttaattttgattgttcttcttttttatttgcaatttgttcatcatcttctgggtggacgtcaaatcgttctgaagcgaagtttaaatgctttgctccattcgcacttgcatccacaatagcggcaatccctcgtaaaaatggaattttttttagggtagatagtactttattacgaacgcgtggtaatcgataaaattcaatcgatttatctttacgacgaaccgctgtaacagtatattctctaccgccaaacataactccttctatgaccgcttgcccgccatatatttgttttgactcttctgccatgttaacaccaacctgtatttgtttctctcttatgtagaaaaagaggcaattgtcatactgggttctgtcgttttgaaataagacaatcaccgagtttcctttattttatcggcaaatacaagtagatgacaagggaaaatgttatgagagtcggacatttcttattctttttatagacaaatttcgcaggatttaaacatgcttcaaaatagtttcgggcatactattgagcggaggtgtcgatgtgagtcaagaacaattaggaacaaggaattttgtgcagattggtttgtttggtggaatcttttggggcggggtatggtatttccttcatatattttcattcacggaggcgggcccgaattatttccttttaccatttgcgtttggaagttggaaagagggtgtatggggcaatgtgttcggaatagtgtgtatgggacttctttcaattttgattgcctttttgtataaagcattttttgcaaagtttgaagggattatagcgggaattatttatgggctattttggtgggcactactgtttttggggatgggtttaatggctcctgttattaaaagtgcgctccatttaccaaaagagacaattgtgacgacaatatgtatttttatattgtatggtgtgtttatagcatattctgtttcttacgcagtaaatagcaataaagcagaacaagaagggtaagagaagacgaactattcaaataagtaactcctatgttaaaatattgtatagatatttaatattaaggagttttaagaatatgaaaaagttactcctcgtaaacggtcctaacctaaatcgcctcggtgttcgtgaggtaaatgtatatggaaagggcacgctaacgacacttgaagcagatatgaagcaagaagcagaaacaatgggagtggagttagaatgtttccaatcgaatcatgaaggtgccattatcgacattattcatgaagcggaagatatatatgaagggatcattttaaatccgggagcatttacgcattatagctatgcgattcgtgatgccattgcgagcatttcgattcctgttattgaagtacatatttctaacattcatcagcgtgaatcgttccgtcatgaatctgtgacggcagctgtttgtgcaggtcaaattgtaggatttggtttttatggctataagttagcgttatttgcattaatggagaaattgagggaggcataaagtaatggagaaaattgaaagattacgaagtgcatttgatgaggctggtattgacggtattttgttaacaaatgaacatagtcgtagatatatggctaacttcacaggaacagcaggcgttgttcttatttcaaaagatcgtgctcaatttattacagatttccgttacgtcgagcaggcaagtaaacaagcggttggatatgaggttgtacagcacgcaggattgatcattgatgaagtggcaaagcaagtgaaagagcttggaattcaaaagcttggttttgagcaagatactcttacatatagttcttattcagtgcataaggaagcgattgatgctgaatttatcccgacttctggacttgtagaaaagttacgcttgataaagactgattcagagattaagatattaaaggaagctgcacagattgcagatgctgcctttgagcatattctatcattcattcgcccgggagtatctgaaattgaagtgtcaaatgaacttgaatttttcatgagaaaacaaggagcaacatcttcttcgtttgatattatcgttgcttcaggtcttcgttcggcattaccgcacggcgtggcatctgaaaaagtgatagaaacaggagatttcgttacattagacttcggcgcttattacaaaggatattgctctgatattactcgtacgattgcagtcggtgaaccatctgataaattaaaagaaatttataatatcgttttagaagcacaactacgtggtgtgaacggtattaaagctggtttaacaggtcgcgaggctgatgcgctaacgcgtgactacataacggaaaaaggatatggtgaatactttggacactctactggtcatggaataggtcttgaaatccatgaagcaccaggtttagcgttccgttctcatacagtacttgaaccaggtatggctgtaacagtagaaccaggtatatatattccaggtattggcggcgtacgtattgaagatgatatcattgtgacaagtgaaggtaatgaagtaattacgaaatcaccaaaagaacttattattttgtaatacacaggaggatttttttacatgatttcagtaaacgattttcgtacaggtttaacaatttcagtggacaatgccctttggcaagtacttgatttccaacacgtaaagccaggtaaaggtgctgcattcgttcgttctaaactacgtaatcttcgcacaggttctgttcaagagaaaacattccgtgcaggtgagaaagtagaaaaagcacacatcgaaaaccgtcgtatgcaatacttatacgcaagcggtgaggctcacgtatttatggataacggaacttatgagcaaatcgaacttggtgaaaaacaaatcgagcgcgagcttaaattcctaaaagaaaacatggaagtagcaatcatgacttaccaaggcgaagtacttggtgttgaacttccaaacacagttgaattacaagttacagaaacagagcctggtattaaaggtgatactgcttctaacgtaacaaaaccagctacattagaaactggtcttgttgtacaagtaccaatcttcattaacgaaggcgaaatgcttatcatcaacactggtgaaggtaaatacgtttctcgtgcatagtaaaaaagcactcgtgataattcacgagtgctttttttataggaaatagggtagatagtaaatagctgttattataaaactgactaaaacaagtgaaagagtacccataatagatggagtcaaaacaatttgaaatggttttatttcgccagtctcaacgccagttaatgttttacttattgcgtgatctgtaatgttatttctatggttactcataataattaaccacataattgcaaatattgctaaactaccaaggaaaaaggtctctataaatgaccaaccgaccaataatgaaaaaagataaataagagctaattctactacaacggttaaactaactttcaatgccttcatatttttccccctcattctgtaatttcaaccagtttaaaaaattttcacgtgacacgacatgcagagagcaaggtgactttacttctttctctagtgcagcgtgttcgtctggaaacttgttttccacatgcaatgaaatataaggtagtttttcttgtgcttttaaagagcggatattattcgttttagcaccagcaaatacgtaggaaagttgtaagtctaaaaaggcgattttaaagatttcttttttagcagcctcgttatagccttttccccagtacggatagccgagccaactaccaatgtgagattgctttttctcattattaatatgtttaagtgtggtgaggccaattatttcattttcttcattcacaatcattctcgataaggatttcttttgacgctcttcttctattgcgaaaagaagaaatgttttcgtgtcttcgatattttctaccgttatccccaatgcattttttatatgtggatcacttgatagctcgaaaatcacatttgtatagcataaatctagtggtaataaagtgacgtgctgcatggtttaaacctcttttaaactaaatgtaccataatataccatgaaataatatgaatattcagattgtaattcagactttagagaaaaattatgtttttacttctgaaatagacaacctctgcatatggttgtacaaatatattcttttttagaatacgaagttagtaactgttacgggagaaggtggaagaatgaaacagtggctagcggcaatggaaacatccgtgcttgttatgggggcacttcgattattttcaggtagtgcggagatatttgctgctttgcttatgctttatgtgaatgatgcgaagaaagcgttgtttataaatggtatgttggcgtttgttggacctaccgtattaattttaacaatgacaattgggatagcgagtgtagcaagtgaaatttctttcttgaagctcttttttctagcgcttggaatttgctgtatttttatcgcattactgaaatagtaagtcgagtatagtggggagaagccgatgaaagaggtattagaagttttaccaaaaacgatgaagtacttaattgaagaatgtaagcaatacgatgctttagaggaaattcgcgttcgaattggaaggccgctagagtgtattgcacacggaaaggtgtttttttatgactatatcactactgcagaggatgctatttacttattgaataagttaagtcaattctcaatttatacgatggaagaggaattaaaacgtgggtatgtgacgcttcgcggagggcatagaatcgggttagcaggaaaagtcattacagaaaaaagcgcagtgaaaatgattcgtgatgtctcttcctttaatattcgtattgctcgtcaaaaaatagggattgctgaaccgcttttgccatatttgtatgaaaaaaggtggttaaacacgatggtaattggccctccccaaacgggaaaaacgacactcttaagagatgtagcacgttgcatgagtcaaggggtaagtgcttcggaaattccttcctgtaaagtggggatcgttgatgaacggtcagaaattgctggttgtgtgaaagggatcccgcaatatgattttggtacccgagtcgatgtgttagacgcatgtccaaaggcagaaggaatgatgatgatgattcgttctatgagtcctgatattttgatcgtagatgaaattggccgtaaagaagatagtgaagcaattatggaggcagtgcatgcaggtgtccagctttttataagcgcacacggattttcctatgaggatgttgtgagacgtccatcgctcaaggcagtgctagagcttggtatatttgataggtttgtggagttgtcaaaagcgaggggtccaggaacggttatgcaggtgaaagataaatatggaaaaccagtgttatcaaatagaaaggctgagggcgtatggtgaaaatatttggtgcagtgttaatcgttgcggtcagcacctttttcgggttttcgtacgctaaaagatacagtgagagaccgaggcaacttaggttattaaaatcagcacttcaatcattagaggcagaaattatgtatggacacacacctttatctgaggctgccgagcgattagttaaacaaatgccaaagccattaaattggatatttcaaagtttcgctaaaaaactagaaagtggagaacaaacagtaagggaagcttggatagatagtttgaaagagaattggaagttgacggcttttcaacaaaccgagtatgaaatactgcagcaatttggtgaaacgctcgggcaacatgatcgtgaatcacaacaaaaacatattcgcttatgtattacacatttggagagagaagaagaggaagcgaaagctttacaactgcaatacgaaaaaatgattaagagcttaggggtactagcagggctacttattgtaattttactgctataggggggagaaaggcgatgtccattgatgttggattaatatttcaaatcgccggaatcggcattgttttagctttcattcatactgtactaaaagaattgaagcgtgaggatattgcaaattgggttatccttgtcggttttgtcgtcattttatttcatgttgcatttttaattaatacgctattcgacaagattaaaagtgtctttctcttccagtaaaggaggcggttcgaatcgaaattatacaaattgtcggattaggcctcgttgctacgtttttagctgctgttttgaaccagcataaatctagtattacatctttatttattgtgttcgtaggtagcgtgatgtttcttattttaatcgatcaaattcattctattttacaaatgattgagagagtagcgagtgaagcgaaagttagcaacgtctacgtggaaacgttactaaaaattattggaattgcttatattgccgagtttggagctcaaattacaaaagatgctggtcaaggtgccatcgcttcgaaaattgaacttgctgggaaaatcttaattctcgttatggcaattcctattttgacggttgtaattgaaactattctcggatttttaccgacgggataagggggagtgaatgttgaggaggtttggagctaagctgctatttgcttgcttccttttcttttctttaccggttgttgtacaagcttctcctgtagaaacaaacgtcgttgatcaacaattggataagctcggaattgaagatgtgaagcaattttgggacgggcttgttacaaaatatggtggctatttgccagagagtcaaaaagggagttttatggagtttgtaaagggagaaaaagaattctctctaaaagagtggatgatagggttattaaaatatttatttcatgagcttgcagctaatggaaaactgcttggcacactcattatgctcacaatctttagtgcattgttgcaatcactgcaatccgctttttcaaaaagtagtgtaagtaaaattgctgatgctgttgtatatatggtacttattatttttgctttaaatagtttttatgtcgttatgacatatgcaagagaaacgatacaaacaatggtagatttcatattagcgctattgccaattttattggcgcttatagcgactggtggcggggttgtatctgtatctttctttcatccgattatcattttcttaatgaatacaagcgggcttcttatgaattatatcgttctaccgcttttattactggcaacgatattaagtattgtaagtacaatgagtgatcaatataaagttacaaaattgtccaagcttctgcaaaacgttagcgttgggattatcggtatcttcttaacgatttttttaggggtattatctgtacaaggaacagcgacagccgttgctgatggcatagctgtgaaaactgctaaatttgtaacaggaaacttcattccagtagttggaaggatgtttacggaagcggcagatactgttattagcgcatcaggattattgaaaaacacagtcggaattattgggctcgtcattttatgcttaattgttgcttttcctgcgattcaaattttctgtattgcatttatttataaattcgcagcagcagtattacaaccggttggcggcggagcaattattcaatgtttagacattattggaagaagcatcatttacgtatttgcttgcttagctatcgtatcatttatgttctttttaagtattacaattattattgctgcggggaatattacacttatgatgcggtaggaggtgaagagtatgcaatttgttacagagtggatcagaaatattatcgtttttttgctcttagcgacaatgattcatcttattcttccaaattcgaatttgcaaaaatacgttaaatttgttgtaagtcttttgttagtcgtattaattttaacacccctttttaaactattgcagacagatgtaaatgaagtaattgcaaattttaatgaagaaaagtacgtagcagaaggatctgtaaaaaattcaatagattcgaagaaaaaagaaatacaagctctaacacgtgcatatagtttagaagagatggctaccaaaatgaaaaaagaagtaggaaaagagtttgagaaaaagtatggtatggctgtctctgaaatacaaatagtcgcagcagaaaatatagaagaagtaaagtcagcgaaagatattcaatctgttgttgtgacgttgaaagaaaaagaacgtagtaaaaatgatgcaatcgaaacagtaaagccaattgaaattaacacgaaagagcctccaaaaaaagtggaagaaacgaatgtagaaatgaaagatttcttttcaagcaggtggcaactagagggtaaacaaatccaagttcaaatggaagggaggacaggtagagtaaatggacaataaagataaaaattcgaagttctcattttttcgaaacttattgaatggggatcaaaaagaaagcaacgagaagggtaaaaaggtaacacctaagtttttacttgtcctactcatacttggaattttgcttatgttttctagtagtctcttttcaagtaaaaaagaagaagtacctgtatttaaagaacaaaaaactcaaaaccaagaaaaagacgtaccaactttcggacaaaaaagtaatgatagtatgtcaaatgtagaaaaatatgaaaaagcgtatgaacaagaattaaaaactgctttagaagaaatagcaggagtaaaagacgtaacgattaaagtgaatttagattcatctgaagaaaaaattttagaaaaaaatacagtgaaacgctcacaaacaacaggtgaaacagataaaacaggcggtaagagagaagtagaggacgagtctcttgatgaaaagactgtcattatacgtgaaggggataaagaaactcctgttgttttacgaacagagaagccgaaagtacgtggtgttcttgtcgtagcaaagggagtggataatatacaagttaaagcaatggtaaaagaagctgtgataaggctgctagatgtaccggcccatcgcgtttcagtttcaccgaaaaattgatagggaggaaataaagtgttaaaaaaacaaacagtttggttattaacgatgttaagtttagttgttgtactatctgtgtattacgtgacaactcctgacaaaatgaatacagcatcgccagcaacaggtgaaaagattggacaagaaaaacaaggtactgataaagcagtaacaaacgaagcgcctaaagaaactccgaaaaaagaaaatacaagcaaagaaacaacgaataaagaaacagacaaaaaagaaaatgcaaaaaaagaaacaagtaaaaaagagggcaatgtatcagttcaatcaagtgatgagaatttcacagctttacgtatgcaaatggaagatcagcgtagtgaacaaaaagcaaaattacaagaagtgatgagttcaacaaaagcttcagcaacagaaaagaataaagcgaaagaaaattttgatgccattacgacaatggaaacgaagcaagaattacttgagacagtaattaaatctcaaggaggatatccagatgctcttgtaagagctgatggtactgatattagagtaacggttaaagcggcaaaacattcacagaaagaagcaaataaaattattcaacttgtaagaagtgaaggcggatcaaaagatgtaggtgtgaaatttgatccaccagcgaaataagtgaaactttaatccgtagggatttccctacggattattatcttttactaagcaaagggtatgcaaatagtaaaaagagtatgtaagtacgtgtgaatagaaaaaagctatcattttcgatagcttttttctattgcgtctttgtaattatttttactatgttcagctcggaatggagaaacacgttgtgagtaaaagattaatggttcatggtactgatgattactttttccggatttgacgtggatgcaaagaacgcatgcccaaacgattacagcaggtaaaaagagaatgagccatatcatatttccacacctcgacacaatatattttctacactttgaacatactattcttatatgaaggaatgatgaacggtgtgtaaacaaaaaaaaaatatttggtaaaaatatgttattgactataggtgtggtgaagagggaatggcatgtttgctgtgtaacgttttgaaaaagtagtgaatgttttttaagaagtggtcttgccaatttcgtgtgaaacttggtattattactaggtattaaatttttattggaataatatttttacaggagtttcgatttattataaagaaatataaattggaatgtttaaaaaatttatcgtaagatggaaatagtaaatatttctattagttaatgaaatatattttctaatagaatacatcgtatttttacagtcaatctagttttcgtgacgagaatctgtaaaaacgggacaaacaagagtatgggagtggattttacatgtttaaaattcaagaagttcgcgaattaattaaattaattgatagctctaatattgatgaatttgaatacaaaaaagacggtacaacaatcaaaatgaaaaagcgtggtaatgaagttgttgctgtgcaagcacctgcagcaaaacaagctatgcaaccagtagcgcctgttgaagttgaaacgaaagtagcagcagcacaagcagaagcgccaaaacaagaagagaagaaggctgttcaaaatgaaaacctacataaaatcacatcaccgatggtaggtacattctattcttcttcttcttcttcgcctgatacacctccatatgtaagtgttggggatagagtatcgaaagattctatcgtgtgtattgtcgaggctatgaagttatttaacgaaattgatgctgatgtagagggcgaaattgttgaaattcttgttaataacggacagcttgttgagtatggacaaccgctatttcttgtaaaagcgtaataagggagtctttgtgatgataaaaaaagtattaatagccaatcgtggggaaattgctgtacgaattattcgtgcttgtaaagaaatggatattgaaacagttgcaatttattcagaagcagataaagagtcacttcacgtacagattgcagacgaggcgtattgtgtaggaccaacgatttcgaaagaaagctatttaaatttgacgaacattattagcgttgcgaagttaacaggctgcgatgctattcatccgggatacggatttttagcagagaatgcagatttcgcagaattatgccgtgaatgtaacttgatttttatcggtccaagtccagaagctatttcaaagatgggcacaaaagacgttgctcgtgatacaatgaaagaagcaggggttccgattgtaccaggttcacaagggattattaaaaataccgaagaagcgatcgagcttgctaatcaaattggatatccagttattattaaagcgactgcaggtggcggcggaaaaggtattcgtgttgcacgccatgaagaagagcttataaaaggaattcaaattacacagcaagaagctagtaccgcttttgggaaccctggtgtatacttagaaaagtacgttgaagatttccgccatgttgagattcaaataatggcagatacacacggaaatgccattcatttaggagagcgtgattgtacaattcagcgccgtttgcaaaaactactagaagaaagtccatcacctgcacttgatgaagatattcgcaagcagatgggtgaagcggcagttaaagcggcggtagcggttgattatacaggtgctggtacggttgagtttatttatgaatataaaacgaaaaccttttatttcatggagatgaatacgagaattcaggttgagcatccggttactgaaatggtaacgggaatggacttaattaaagagcaaattcttgttgcttcaggagaaaagttatcgttacagcaagaagaagtacaatttaatggttgggcaattgaatgtcgaattaatgcggaaaaccctgccaaaaaatttatgccatctccaggtaaagtagaaatgtacttaccaccaggaggatttggtattcgcgtcgattcagctgtatatccgggatattcaatcccacctttctatgattcgatggttgctaaattaattgttcacggaaaaacacgtgaagaggcaattgcaaaaatgaagcgcgcacttagtgaatttgtcattgaaggcgtacatacaacaatcccgttccatttgcaattgctagatcatcctgattttgtaaaaggtgagtttaatacgaaatttttggaagagcatgaacttgtgacgcagtgatacattaaaggaggtttttttcatggctgaacatatgttagatatgggtcaagatacaactcttggtaaagtagaaattgcaccagaagtaattgaagtaattgcaggtattgcagctgctgaagtagaaggtgtagcggcaatgcgcggtaattttgctacagatgttgttgagaagttaggtaagaaaaatcatggtaaaggtgtaaaggttgaattagcaaacgaagatattatcgttgacctttatgttgtaatgtattttggtgtagcaattccagttgttgcacaaaagattcaagacaatattcgccaagcactctttacaatgacaggacttgagccaaaagaagtgaatgttcacatcgttggcgtaacattcgaaacacaaaaaacagaaatcgaaccagtgtaagaatgaaaaggtgcctagtaacataggcatcttttttatcgtttcatttcttcacaaattacaaccctctaattattatactatttcaaaaaataagaaataaacaaggaaatgtgtcgtttttccaaaaaacgtacattgtgataagatatggaacttgaagttaatctttttattatttttcagccttgtaacccgtgtgtgaaacgataaattgtgttattatcattgtattataaggttggaaaatcaatgaaaactgtaagagtaagtgaattgacggcttataaattataataatataacaaagtataaggaaagacttgaagcataaaggagagttacaatgaaacgtaggacggctagagaaagagcaatgcaagcattataccaaatggatattacaggtgaattagaaccgaaagtagcagtggaaaacacgctggatgaaggcgaagaaacaaatgagtttctagagtcacttgtagtaggttttgtagaaaataaagaagcaatcgatgaagcgattcgtcaaaacttaaaaaagtggaagcttgagcgtattagtattgttgatcgcagtattttacgtgtagctgtgtatgaaatgaagtacatggaagaaattccacacaacgtaacaattaacgaagcaattgaaattgcaaaaacatttggggatgaggaatctcgtcgttttattaacggcgttttatctaatataaaagatacactgtaaattctttaagggggaatcttaaaatggtagcagtaatcatcaaaggaaatgaagttgcggagaaaaaacgagcacaattaacagaagaagttgtgaagttgaaagagcaaggtattgtaccaggattagcagttattttagttggagaagatccagcatctcgttcttatgtgaaaggaaaagaaaaaggctgtgaacaagtagggatttactcagagctaattgaacttcctgaaacaattactgaggaacgtttgcttgctgaaatcgatcgcttaaatggagatgaccgtattaatggcatattagtgcaattacctttaccaaaacatattgaagaaaaagctatcattgaaagaatttcaccagaaaaggatgtagacggatttcacccaatcagcgtgggacgtatgatgacgggacaagatacattccttccatgtacaccgcatggtattgtagaattagtaaaagaaacaaatcttgatatttctggaaaacatgtagtagtaattggaagaagtaatattgtcggtaaaccagtgggacaattgtttttaaatgaaaatgccactgtaacatattgtcattctaagacgcaaaatatgaaagagttatcgaagttagctgatattttaatcgtagctgttggacgacctaaaatgataacagcggattatattaaagaaggagcggttgtaattgacgttggtgttaaccgtttagaaacaggaaaactttgtggtgatgttgactttgacaacgtgttagatgttgcgggttacattacacctgtgccaaagggtgttggtccaatgacaatcacaatgcttcttcataatactgttgaatctgccaaacgtgcaggtgtcgtttgtaaataatttgagtcggctatgaggagagagaaatggagaagcaatatttaaccgttacagcgttaacacgctatataaaaacaaaaatagaatatgatccgcatttgcagtctgtttggttaaaaggtgaaatttccaactttaaaaatcatagccgtggccacatgtattttacattgaaagatgaaaatgcaagaatcgcagcggttatgtttgcgggccataatcgtaatattaaattcaaacctgaaaatgggatgaaggtactcgtgaaagggaaaatctctgtttacgaggcgagtggttcttatcaaatttatattcaagacatgcagcctgacggagtcgggaatttacatttagcgtacgaacagttaaaagttcgtttagaagaagaaggacttttttctcaagtttataaaaaagcgattcctccttacgctaaaacaataggtgtgattacgtcgccaacaggagcagcgattcgtgatattataacaacgattaaacgtcgttatccaattgggaatgttattgtatttccggtacttgtacaaggggagtcagcggctccctcgattgtacaagcgattcgtacagcgaatgaaatgggagagatagatgtactaatcgttggtcgtggtggaggttctattgaggaattatgggctttcaatgaggaaatggttgcaagagcaatctttaagagtgaaattcctattatttcggcagtaggccatgaaacggattttacaatcgcagattttgttgcagatttacgcgcgccaacaccgactgcagcagctgagctggcagcacctaacattatagagttacaagaaaaggtattacaaagaactctgagattgcaaagagcaatgagagagttagtacataaaaaagaagaaaaactacaagtgttgcaaaaatcgtatgcgttccgttatccaagacaagtatatgagcaaaaggaagagcaattagatagagcgctagaacagcttgttttagcgaaagagcgctatattgataaaaaggtgaatcagttaaagcaactttcattttatttagagaagcaccacccatctcaaaaaattatgcaaacgaaggtagctgttgaaacgttgcaaaagcaattacaacgtgaaatgcaaacgttacttcaaacgaaagaatttgcctttgtaagagctgctcaaaaacttgaagcgttaagtccgcttaaagtaatgatgagagggtacgggcttgtatatgatgaagagaagcaagtgttaaaaagtgtgaaagatgtaagccttggagatgctgtttcagttcaattacaagatggaatactagattgtagcgtatcaggcatagaggagcgtgaattgaataatggaaaataaattaagctttgaagaggcaatttcgcaacttgagcatcttgtttctaagctagaacaaggtgacgtacctttagaagaagcgatttcttattttaaagaaggtatggaattatctaagctttgtgatgagaagctgaagaatgtacaagaacaaatggcagttattcttggggaagatggagagcttgaaccgtttactgctttaggagatgaagcatagtgacgattgcttttgatacttttttgaaagaaagtaaaactttcgtagaagaaaaacttgtaagctatgcaaatgaattacaatgtccaaatgtacttcgtgaagcgatggcatattctttggaagcgggtggaaaacgtctccgcccgttacttttgtttgcaacattacaagcgtttgggaaagaaagaaatcttggagtaggtgcagcttgtgctcttgaaatgattcatacatattcattagttcatgatgatttaccttgtatggatgatgatgatttaagaagaggaaagcccacaaatcacaaagtatttggtgaagcgatggcagttttagcaggagatggcttattgacgtatgcttttcaagttattatggcatatgagcaaaaagaaatttctgccgaaaaaaaagtaagacttgtacttgaacttgcaaaagcagcaggaccagaaggaatggttggcggacaagtggcagatatggaagctgaagggaaacgccttacgattgatgaattggagtacatccataaacataagaccggaaaactgcttgaatttgctgtacttgcgggtgcgatactttctgatgcgacagaagagcaagaagaaaagttgcttacgtttgccaaatatatcggtctagctttccaaattcgagatgatattttagatgtcgaaggaactgaagaagagattggaaaaccgattggtagcgatctttctaatgaaaagagcacatatacaacgttgtttactgtagatagagcaaaggatattttagaagaaacaattgcagaagcaaaaggtgcgattagttccttgcaattacaagatgaatatttactatctatttgtgatttgattgcaaaacgtaataactaatataacagcgttttcatttgttgagtcattcatcattttatgatataaatgtaggaaaaggtttttcttttcttgttattggcaaaaatatatgtagattacattgccgttatcacttcgtgttagcggctatttttttcatcgcctaaagaaatatggtttataataggattagggcgcaatagactggttaatagcgggacaagacgaaaaatagaaaagagaatttcttgttttgtgtaaatgttttttataatatttgacatgttgacagattatgaaatgaaagtgagtgatccatgtggatctaacgcaaattcaaaaccctagttttttgaaagatatgtctatcagtgaactagagggattgagtgaggatattcgtaagtttttaattgaagagctctctcaaacaggtggacatattgcacctaatttaggtgtagtagaactcacaattgctctgcacaaattatttgatagcccgcaagataaatttttatgggatgtaggacatcaatcctatgtacataaaattttaactggacgtgcgaaagagtttggtacattaaggcaatatcaaggtctatgtggtttcccgaaacgttgcgagagtgagcacgatgtatgggaaactggtcatagctcgacttcgttatcggctgcaatgggaatggctctggcacgtgatttaaagaaaacgaaagaatatgttataccaattattggagatggtgctttaacaggcggaatggctttagaggcattgaaccatattggacatgaaaaaacagacatgattgttattttgaatgataatgaaatgtcaattgcaccaaacgttggtgcgcttcataatgtgctcggtcgtttacgtaccgcaggaaaatatcactgggtaaaagatgaattagagtatatattaaagaaaatcccagcagttggcgggaaagtggctgcgacagcagagaaaataaaagatagtcttaaatatttactagtatctggtgtctttttcgaagagttaggctttacatatttaggtccagtcgatgggcatgattatgaaaagttattcgaaacgttgcaatatgcaaagaaaacaaaaggcccagtgcttgttcacgttattacgaaaaaaggaaaaggttataaaccggctgagagtgacgttattggaacttggcatggaacaggaccttataaaattgaatcaggtgacttcgttaagccgaaagaagttgcaccagcatggagtgctgtcgttagtgaaacagtacttaagctagcgagagcggatgagcgtatcgtagcaattacacctgcaatgcctgttggatcaaaacttgagaaattccaaaaagaattcccagatcgtatgattgatgtaggtattgcagaacagcatgctacaacaatggcagcaggtatggcaacgcaaggaatgaagccattcttagcgatttattcaacatttttacaaagagcatatgaccaagttgttcatgatatatgccgccaaaatttaaatgttttcatcggaatagatcgctcgggattagtaggagcagatggtgaaacgcatcaaggcgtatttgatatctcattcttacgtcacttgccgaatatggtgcttatgatgccgaaagatgaaaatgaagggcaacatttagtttatacggcgatgcaatatgaagatggaccaatcgcattgcgttatgctcgcggtaatggacttggcgttcatatggataaagaattaaaggcgattccaatcggtacgtgggagacgttaaaagaggggacacaagcagctattttaacgtttggtacgacaataccaatggcaatggaagcagctgagcgtcttgaaaaagctggggtttcagtgaaagtagtgaatgctcgctttattaaaccaatggatgaagcatatttacatgatcttctaggaaagaatataccgattttaacgattgaagaagcttgtttaatcggtggttttggaacaggagtagttgaatttgcatctgaaaatggttaccatagtgcattagttgaacgaatgggtattccagaccgcttcatagagcacggaagtgtaacaaaattattagaagaaattggtttaacgacagatgctgttgtagaccgtattcatacaatgattccatcaaaacaaaaaagggcgtaacaaatgagcgtaaaaaaagaaagagtagatgtactattagtagagcgaggacttatagaaacgcgtgagaaagcaaagcgcgccattatggccggactcgtatatgcaaatgagatgagacttgataagccaggagagaaaatctcgcaagatactgagattacggtgaagggacaagttatgccgtatgtaagtcgtggtggttataaacttgaaaaggcattagagacatttcatcttgatttacaagataaagttatgatagatattggttcatcaactggtggctttacagattgcgcgcttcaaaatggagcgaaattatcttatgcattagatgtaggatacaatcaactagcgtggaaattacgtcaagatgagcgtgttgttgtaatggaacgaacaaacttccgttacgtgacaccggcagacttagaacgtggtttacctcaatttgcaagtattgatgtttcatttatatcattaaagcttatactgccagttttaaaaacaatgcttatgcctaacggagatgtagcagcgttaattaaaccgcagtttgaagctggaagagagcaagttgggaaaaaaggtatcgttcgtgatagaaaagtacatgaagctgttgtagaaatgattgtcgagtttgctttaaaagaaggctatgatgtggaaggtttaacattctcaccaattacgggtggggatggtaatattgaatttttaattcatctgaaatggcatggtgaacgtgagaatggcgaaaatcattctccgatttctatagagcaagttgttacagaagcgcatgacgttctaaaacaaaaagggaaaggggaataacatatgttgttcctctttttgctgtaattgtataatgattgtaaaaacaattgtgtacaagaaacgaattataagttaacataaataagtgaagtataccaatgtttaaactatggtaagagatagtgtgaggtgcaaatgtatgaataaaggtcagcgccatattaaaatcagggaaattattgcaaacaaagaaattgaaacacaagatgaattagttgatattttacgtaatgagggatttaatgtaacgcaagcaacagtatcgcgcgatattaaagaactgcacttagtgaaggtgccattacatgatgggcgctataaatatagcttgccagcagatcaacgatttaacccgttacaaaaattaaaacgaaatctagtggattcatttgtaaaattagacacggcaggacatatgcttgtgctaaaaacattgcctggtaacgctcattcacttggagcacttattgatcatttagagtgggatgagatcatcggaaccatctgtggtgatgatacttgcttaattatttgccgtacacctgacgatacaggtgttgtctctgatcgtttcttaaatatgttgtaacaaaaaatcttgtttgctttccatcgtaaagtggaaagtgaacaagatatttttattggttaaaaatatgaattttcaattgtaatataatattttgtttgcataaagttaaaaaatagatggattgacccgtaaaacaaatgtttggtacaatgaagcgggttagaagagtatatacatacaaatatatagcatgattatttgaatgaagaactgagaaaatcctttagtaagggattattttataacgaggtgaatggggcattgttatcggaattatcgattagaaactttgctattattgaagcattaaatatttcttttcaaaaaggtttaacggttttaagcggtgaaacaggggccggaaaatcgattattattgatgcaattagtttacttgtaggtggccgtgggtcagcagaatttgttcgatatggaacagaaaaggctgagattgaagggctattttatgttgaagatgagaagcatccatgtattgaaaaggcagaagagttagatatagaaatagaagatggtatgattattttaaagcgtgatattgctgcgaacgggaagagtgtatgtcgtgtaaatgggaagcttgttacacttagcatattaaaagaaattgggaaaacacttgttgatattcatggacagcacgaaacgcaagatttaatgaatgaagaacgacatctgtttatgcttgatcactttgatggggatcgaatcgttaaacaattagacatatatcaaaacgtatacgctgactatgaaaaattaaaaaaacaattgaaatcgttaagtgaaaatgagcaacaaatggcacatcgcttagatttaattcaatttcagcacgaggaaattcgcaaggcggatttaaagatggatgaagaaaatgaattaactgaggaacgattgcaaatttctaattttgaaaagatttataaagcgttaggtgatgcatatcgttctttaagtgccgacggacaaggattagataatgtaagaagtgcaatggggcaaatggaaagtattacacatttagatgaagtgtatcaagagaatcatgattcaattgcaaatagctattacttattagaagaggttgcctatcaactgagggaaaagctcgatatgatggaatatgatccaaatcgtttagatgaaattgaaacacgtttgaatgaaattcgtatgctaaagagaaaatatggaaataatgtagaagagattttagcgtatgctgataaaattgaacaggaaatttttacgattgaaaataaagacgttcatattgaaacgacgaagaaacagttgaaggaattagaaagtgttattatgaaagaagcaacgttgttaagtgatatgcgtcatgagcttgcagaacaccttacaaatgcaattcatcaggaattaaaagaattatatatggaaaaaacgaaatttgaagtgagaattatgaagagagaaggaaatgcagaagagccccttgtggaaggtgcgccggtaagacttacggcggatggttacgatcatgtggaattttatatttcaacgaacccaggagagccgctaaaaccactttcaaaggttgcttctggcggagagttatctcgtatcattttagctttaaaaagcattttttctaagcatcaaggggttgcatctgttatttttgatgaagtggatacgggtgtaagtggccgggtcgcacaggctattgcggaaaaaatttatcgagtatcagtaaactcgcaagtactttgtattacgcacttacctcaagtagcttcaatggcggattcacatttatttattcgaaaacaagtagcgaatgatcggacaattacatcagttactgttttaactatggaggataaagtaacagaaatagctcgaatgatttctggtgtggaaatcacagatttaacgacagagcatgcgaaagaattacttacgcaagcgcatcattttaaacagacagcagaggctatccagtaatggatagctttttttctcaaatgacgatttcttaattcttccggttataaataaagcactgcaaggagagattaaaaagtgaagccaagaggctgaatgtggggtaggagcgaggagagtgaacaagttgaaattagaaaaatttcgaaaaataataggtctttgtctccttgtttctttagtttttattggatgttttaaaccgcttcgaacgtttatttcatcaccgaaacaacttgttgtttttgaagggcaacaatcagaaatatcatcattaccagttttcaaagcttcatccacaaatcgtcatgtatttacagtgagttcgaatgaacaaaaacaaggacttatggtaaattctcatcaaaatggtgaagctgatatggtatttcagcttgctggttttccagtgaaaaaagtaaatgtgaaagtgttaaaagattttaaagtgattccaggtggacaatcaattggtgtgaaattaaatacaaaaggtgtacttgttgtaggccatcatttaattcaaactgaaaaaggtaaaatatctcctggtgaaacagcaggtgtacaaattggagatatgattactgaaattaatggtaaaacaattgaaagaatgagtgatgtagcaccgtttattcataatagtggagaaacaggtgaaccgcttactcttgtattgttaagagatggaaaatatattcgtacgaagctaactccacaaaaagacaacggtgaatcgtcttatcgaattggcttgtatatccgtgattcggcagctggaattggaacgatgacatttgttcatccagattctatgaaatatggggcacttggtcatgttatttctgataatgatacgaaaaagccgattcaagtcgaagatggacaaattatgcgctcgacagttacatcaattgaaagaggtagtcatgggaatccaggggagaaattagcaagattctcaccagaccgtgaagtgattggcaatattacaattaatagtccatatggtatttttggaaaattaaatacgaatatgaaaaacggtataatggataaagcaatgcctatcgcattatctcatcaagtaaaagaaggaccggcaaaaatattaacagttattgatcaagataaagtagaagcgtttgatattgaagttgttagtacagtgcagcaaaaattcccagccacaaagggtatggtaataaaagtaacagataaacgtctattagcgaaaacgggcggtatcgtacaaggaatgagcggaagtccaattgtacaaaatggaaaagtaattggtgctgttacacatgtatttgtaaatgatccaacatcaggatatggtgttcatattgaatggatgttacatcaagctggaattaatatttatgatcaagagaaaaaagcgagctaatatatattattagctcgctttttctgttgaaaaattcgttgaaattttgtaaaagctccgcaagaggtgttttttgttgtaaaataaaaggaaagggttgaacgtttcgttgtatttctatgatggaatgtgttgcgaaagggaataaatgagcgataaacatatttttttgtgattttatcggaaagtaagaaactttaaaagggaattttcacacaattgtcgaacaattcatgtagcctagaaggatacacatgtcggagaatcgattcggtaagggaggaaaagctgtggagaaaattaaagtatgtcttgtggatgataataaagaactagtatcaatgttagagagctatgtagccgctcaagatgatatggaagtaatcggtactgcttataatggtcaagagtgtttaaacttattaacagataagcaacctgatgtactcgttttagacattattatgccacacttagatggtttagctgtattggagaaaatgcgacatattgaaaggttaaaacagcctagcgtaattatgttgacagcatttggccaagaagatgtgacgaaaaaagcagttgacttaggtgcctcatatttcatattaaaaccatttgatatggagaatttaacgagtcatattcgtcaagtgagtggtaaagcaaacactatgattaagcgtccactaccatcattccgatcagccacaacagtagatggaaaaccgaaaaacttagatgcgagtattacgagtatcattcatgaaattggtgtacccgctcatattaaaggatatatgtatttacgagaagcaatctccatggtatacaatgatatcgaattattaggatcgattacgaaagtattgtatccagatatcgcaaagaaatataatacaacagcaagccgtgtggagcgcgcaattcgtcacgcaattgaagtagcttggagccgtgggaatattgattctatttcgtccttattcggttatacagtatccatgtcaaaagcaaaacctacgaattctgagtttatcgcaatggttgcggataagctgagacttgaacataaagctagttgagagtaaaagtagtaagggatttaagttttagtaaagcttaataattcttgaaattgatactcgatatcaaatttaaaaccaatgaactttttatttaaagaccaatgaatgttataattcgttggtctttttattttgttgagaaaaagagattatttgatagtatggaaaataaaacctatttttagtaatattacatgtaagtgagttttttataaggcaataaaatagatatagatagggagaaggggaatggaaaataaaatttcaacttggctaggaatagtagcagctatgggagttcttgctattgcagttacatttggaatgttagaacttgcagataatcccgtagataaagaagtgagcgctcaaatagataaaaaagaagaccaaacaatagtaggtagagaggtagatggggtctttgttgatgtgtatgttactgaaaattctactgaaagcgaagtcattacagcgatgcatcgcatgactcatcaaaaagtggtggcagaacgaaaatcgggctctatcccaatgattcaaagtaatgctaaaaaattaaaagaaattataaataagagtagctttgcgaagaaaaatgaacttttagcaattgctgatagatgggcgaaaaaagattttagtaaaattgtagaagatcacaattatttctcggatgctcaagaagatagcgtttgtaaagcaactagagcaatggatgcgttagaagagcaacattatattttaactacattcggggaggaaaaagcgaaagaactatacgaatcaggggatgctccgcacgttcaataaaaaacaatataaagggcttctagtttttttatgatcgtgtttttaggacgcaatggggacttataaataaatggtctgctttctttatgacgtgtaacaaaaaagaaaagatgtgattcattattaaatgatgaaggaacggctaaatcacatcgtagtacatctgttaaaggattttagtaggaaaggcatccgtgatataatagaaaataataaaaagtcctgcaaaacaggactgtattattcttcgtctttattttgtttttctaattcaactagtttttgaattaaaatgtgctgcggcatatgcatgagttgttcaagtggaacacctagtgcttttgataagcggactgcagtatctggagagatttgtaatggtctcatagaagtacctcctttttcgtatagtatagcataagattgggggagtgaggatgactcttatatttgcacatcgtggtgcggctggaacgtacccagaaaatacaatgatttcatttgaagcagctgagtcttttagagcggatggaattgaacttgatgttcaattaacgaaagatggaaaagttgtcgtcattcacgatgaaacggtggaccggacaacaaatggaaaaggtgcggttcgcaattatgtatatgaggacttatgcaagttagatgcaagttataaatttggtgataaagtaggtttttgtaaaataccacttttagaagaggtattagaatggcttgaacaaacgagtttgctacttaatattgaacttaaaaataataaaattccatacagaggtttagaggaagaagttataacgcttgtacggaaatttagtctagaggatcgtgttatattttcttcgtttaatcactacagtatgaaacggtgccatatgatggctcctgatattcaaacagcaattttatatcgcgaaggtttgcatagtccgtgggcatacgcgaaaaaaatgggggctacagcagtacatccgaattatcgttatcttcaagatgctattgccgaactaacgatggaaagtggtgtagaagttcgcccttatacaattaatgaagaaacgcttatgcgtaaatattttgatatgaatatatcggcgattattactgattaccctgaaacggcaagaacgttattgccaataaaaaaatgagaccgcgtgtaacggtctcatttttttatttataaatagtggggcattcctatcttctaaagcgagcttgtactttatttcgtttgcgatctcggtgcaagacgaagccaccaaagatataaaacccgagcgcgaagcagagagcgccgattaaaaattgtaaccacagtatggaaattggtggaaatagaatcccgaatacagtatctctcattaactttataccaaacacagctaatgaaatagggataagtgctaatagtagagcaacgtaacgctgcatacataacgctccttttcagattatttcgtatattttaatgatgttatacggaaagggggtttgtcaagagggtgctgaacgagtaagataagggtgtgaaaaaatttgcagagttacttcgagaggaagtgtaatatatgaaacaaaaagtattaattgttggtgcaggtgaaggcgggagcgcgctgctgaatctgttacaaagttcgaatatatttcaaattatagggattattgatataaatccgttggcaaaaggactacaaattgctaaggaatacgggattgcaattggagaaagtgtaactccatttctttctatgcatatcgatgtaatatttgatatgacaggtgaagatgatgtacataaagttttattagaaaaaaagaaaaaagacactcttcttataccaggtgatatcgcaaaaattgttacaggattagcgcatgagaaggaagggctaattgggcggttagaggaacagacgcaacaaggagaattaattttaaattctacacatgacggcatgattgtaattgatcgagagggacaagttcgtctttttaataaaagtgcagagcgtattatcggatataaaaaagaagaggcgataggaaagtatattttagaagtcattccaactagtaaattacttcgcattatacgtacgaaacaaatagaagtaaattatgaactgacattagagaatggaaagaaaattattacaacgcgtattccaatattaaaagaaggaggagaggtacaaggggcatttgcaatttttaaagatataacagaagttgtagatcttgcggaagaagttacagacttaaaagaaattcaaacactattagaggcaattattaactcatctgaagaagcgatttcggttgtggatgaaaaaggaagaggtttagtcattaacccagcatatacgaaattaacgggtttaacagaagaagatattattgggaagcctgctacaactgatattgtagaaggcgaaagtatgcatatgaaagtacttcgaacgcgtcgtgcggtgcgcggaatacatatgaagattgggcaaaaaaagcgagatgtaattgtaaacgtagcaccagttattgtggatggaatattgaaaggaagcgtcggtgttatccgtgacgtgtcggaaattcaaaaattaacaaatgaattgaatagagcaaggcaaattattcgtacattagaagcaaaatattcatttgatgatattgtcggaaattcagatgaaacaacggcagctatcgaacaggcgaagctaggagcgaatacaccagcaacagtactgttacgcggggaatctgggactggtaaagaattgtttgcacatgcaatccataatggaagtaatcgaaaatacaataagttcgtccgtgtaaactgtgcggccatttcggagacgttgttagaaagtgaattatttggttatgaggaaggggcgttttctggagcgaaaagaggcgggaaacgtgggttctttgaggaagcgaataacggtagtatttttttagatgaaataggggagttgtctgcaaatacacaagcgaaactccttcgtgtattgcaggaaaaagaaattgtaaaagttggtggaacgaaagcgatacctattaatgttcgagtaattgcagcgacacatgtgaatttagaaaaggctattctagaagggaagtttagggaggatttatattatcgattaaataaaattccaattcaaattccatctcttcgtcaacgtaaaggagatataccgacaattgcggacagattgattcaaaaaattaatcaagattacggtcgtaatgtagaagggctcactgattcagccgttttatatttacaatcatacgaatggccaggaaatgtgagggaacttgaaaatattttggggagagctattatctttatgaattataacgagacctatattgatgtacaccatttaccgccattacataacgaagagcaggtggagtcaaagcaatctcatttattacctgaattagaagaaaagccacttgaacatttagtgacagagtttgaagggaatattatttatgaatatttggagagatttgatgggaataaaacacaaactgcaaaagcgttaggaatttccgttcgaaatttatattacaagctagaaaagtatgaccatgcaaaaaatagcatgcaataaattgcgtaccatgcaatttattgcatggtatacaaaaagcgacaaaataagacagaatctttcgttattttctaaagtattgattttactgcattttgaatgcgttttcattattggtaagaccacttttaaaagttggcacggtatttgctttataaatagacgagggacgacggaaagggttgattacaaaatatgaagttagaatacttaattgatcaagcagcaggaaagcctaaaaaaactgtggctgtagcagtagctgaagatcatgaagtaattgaagctgtagcgaaagcaattaaattacagctagctcaatttcgtctatatggaaatcaagaaaaaataatggggatgctacaagaacatggtttacaaacttcagaacatgttgaagtgattgcagcaatgtctagtgctgaagctgcagaactttctgttaaagctgtgagaaatggtgaagcagatgtgcttatgaaggggaacatcccaacagcgaatattttgaaggctgtgttaaacaaagagtggggcctacgtaaaggtagcgtactttcacatgtagcagcatttgaagttcaaaattacgatcgtcttattttcgttacagatgcagcgatgaacatcgcacctgacgtaacacaaaaagctgctattatacaaaatactgtagaagttgcccgggcaataggaatcgacttgccaaaagtggcaccaatcgcagcagtagaagttgtgaatccagcgatgcaggcgacaattgatgcagcgatgttaacacaaatgaatcgccgcggacaaattaaagattgtatcgttgatggaccacttgctttagataatgcagtatcacaaattgcagcagaacataaaggcatagtaagtgatgtagcaggtaaggcagatattttactcgtcccaacgattgaagctggaaatgtgctatataaatcactcgtatactttgcggatgcaaaagtaggagcaatgattgctggcgcaaaagcaccaattgttttaacatctcgtgctgattcagcagaaacaaaagtatattcattagcattggcagttgcgactgcttcaaaataaaccaaaaagggtaaaacattagggggaaacgacaatgacattagaaatcttcgaatacttagaaaaatatgattatgagcaagtagtattttgtcaagataaagaatctggtttaaaagcaattattgcaattcatgatacaacacttggaccggctcttggtggaacaagaatgtggacatatgattctgaagaagcggcgattgaagatgcattgcgtcttgcaaaagggatgacatataaaaacgcagcagctggtttaaacttaggtggtgcgaaaacagtaattatcggtgatcctcgtaaagataagagcgaagcaatgttccgtgcactaggacgttatatccaaggactaaacggacgttacattacagctgaagatgttggtacaacagtagatgatatggatattatccatgaagaaactgactttgtaacaggtatctcaccatcattcggttcttctggtaacccatctccagtaactgcatacggtgtttaccgtggtatgaaagcagctgcaaaagaagctttcggtactgacaatttagaaggaaaagtaattgctgttcaaggcgttggtaacgtagcatatcacctatgcaaacatttacacgctgaaggagcaaaattaatcgttacagatattaataaagaagctgtacaacgtgctgtagaagaattcggtgcatcagcagttgaaccaaatgaaatttatggtgttgaatgcgatatttacgcaccatgtgcattaggcgcaacagttaatgatgaaactattccacaacttaaagcaaaagtaatcgcaggttctgcaaataaccaattaaaagaaaatcgtcacggtgacatcattcatgaaatgggtattgtatacgcaccagattatgtaattaatgcaggtggcgtaattaacgtagcagacgaattatatggatacaatagagaacgtgcactaaaacgtgttgagtctatttatgacacaattgcaaaagtaatcgaaatttcaaaacgcgatggcatagcaacttatgtagcggcagatcgtctagctgaagagcgcattgcaagcttgaaaaattctcgtagcacttacttacgcaacggtcacgatattattagccgtcgctaatcattcatatataacttttacaaaaggcgtggttatctcgtatgaggtttccacttccttttgaatttattagtggaggtagcaacattgtctgtaaatcgaattcttgttattaacccaggtagtacatccacaaaaattggtgtttttgataatgaaagacccgttttagaagaaacgattcgtcatgacgtagaacagattgggaaatacaagcgaattatcgaccaatatgagtttcgaaaagaaacgattttagaagttctacattctcatggtattaacatttcaaagttaaacgctgtttgtggacgtggtggattacttcgtccaatcgaaggcggtacgtatacagtaaacgatgcgatgttagaagatttaaaaaatgggtttagcggtcatcacgcttcaaaccttggaggcattttagcatatgaaattgcttctggattaaacattcctgcatttattgtggatcctgtcgttgtagatgagatggagccagttgctcgtataagtggtattgctggtatggaacgtaaaagtatcttccatgcattaaatcaaaaagcagttgctcgtaaagtagctgaacagttaaaccacaaatatgaggatttaaatttattagttacgcatatgggcggtggtattacagttggtgctcataaaaaaggaagagtaatcgatgtgaataacggtttaaacggagaaggaccatttagtccagagcgtgctggtacagtaccagtagggcaactagtagaaatgtgtttctctggtgagtattaccgagatgaaatgattaaaaagcttgtcggacaaggtggacttgtaagtttaatcggtacaaatgatgcgattaaagtagagaaaatggttgaaaaaggtgatcctgaagcaactcttatttataaagcaatggcatatcaagttgcaaaagagattggtggagctagcgctgtacttcacgggaaaatcgatgcaatcgtattaactggtggactggcatacagtaaaattcttgtcgatgaaataaaagagcgagtggactggattgcagatgttatcgtacatccaggcgaagatgagttagaagcgttagcagaaggagcacttcgtgtattacgtgaagaagaagctccaaaagaatacgttgtacgtgaaaaagaaacggtagctaggggttgagataatggcaaaagaatatgatttagtcatcgttggcggcggtactggtggatatgttgctgcaattcgtgcatcacaactagggttaaaaactgcactagtcgaaaaagaaaatcttggtggtacttgtttacacaaaggatgtattcctagtaaagctcttttacgtagtgcggaagtatatgcaactgctaaaaaaagcgaagagttcggagttattgcaagcaatgtagaactaaactttgcgaaagtacaagagcgtaaagagaagattgtaacgcagcttcataaaggcgttcaacatttaatgaaacaaggtaaaattgatgtgtttgaaggtattggccgtattcttggcccatctattttctctccgatgccagggacaatttcagttgaacttgcaagtggagaagagaatgaaatgttaattccaaaaaatgtacttattgcaacaggttctcgtccaaattcattaccaggtttagaattagacggagagtacgtaatgtcttcagatcatgccctaaaaatggaaacgcttcctagttcaattattatcgttggtggcggtgtaatcgggattgagtgggcatctatgcttgctgacttcggtgtagaagttacagtattagagtatgcaaaaacgatattaccactagaagatcaagatgtttcaaaagaaatgcaacgtctattcaagaaaaaaggtattaaagtggtaactggtgcaaaagtattaccagaaacattggtaaaagataatggagtaacaatccaagctgaacacaacggtgaaaataaagaatttaaagcagaaaaaatgcttgtatctgtaggaagacaagcgaatacgcaaaatattggcttagagaacacagatatcgttgtggaaaaaggatacattcaaacaaatgagttttatcaaacgaaagaatcgcatatttacgcaattggagatgtaatcggtggcctgcaacttgctcacgttgcttctcatgaaggaattgctgcagtagaacatattgcagggaaagaagttacaccaattgattactctatggtatcaaaatgcgtatatagcagtccagaagttgcttctgtcggtttaacagaacaagaagcgaaagaaaaaggctataagttaaaagtaggtaagttctcattccgcgcaatcggaaaagcacttgtatacggagaatcagatggtttcgtaaaacttgtagttgatgaagagacaaatgacattcttggtgttcatatgattggaccgcatgtaacagatatgatttctgaagcgggtcttgcaagagtacttgatgcaacaccttgggaagtagcacatacaattcatccgcatccatcattatctgaggcgattggtgaagcagcacttgctgtagatggaagagcgttacacgcataaaaatgtggatttaggaggttatgaaaaatggcagaagtaaaagaaaagcgccatgaagagcttggcttaagtgatgagcaagtattagaaatgttccgtacgatgttacttgcacgtaaaattgacgaacgtatgtggttattaaaccgcgctggtaaaattccattcgtaatttcttgtcaaggacaagaggctgcacaagttggagcggcgttcgctcttgatagagagaaagattatgcattaccatactaccgtgatatgggtgttgtactagcatttggtatgacagctaaagagcttatgttgtctgctttcgcgaaagctggagatccaaactctggtggtcgtcaaatgcctggtcacttcggtcaaaagaaaaatcgtattgttacaggttcatctccagtaacaacgcaagtaccacatgcagttggtattgcactagctggaaaaatggagaagaaagatttagtaacgttcgttacatttggagaaggttcttcaaaccaaggtgacttccatgaaggggcaaactttgctggtgtacacaaactacctgttatttttatgtgtgaaaataacaaatatgcaatctctattccagttgaaaaacaattagcatgtaaaaacgtatcagatcgtgcgattggttacggtatgcctggatatacaatagacggaaacgatccgcttgcagtatataaagctgtaaaagaagcagcagatcgcggtcgtcgtggtgaaggcccaactttaattgaaacagtatcatatcgtttaacagcacattctagtgacgatgatgatcgtgtttatcgtgataaagaagaagtagaagaagcaaagaaaaaagattcaattataacattcgcggcttatttaaaagaagctggtgtgttaactgaggaatcggaaaaacaaatgttagacgaaattatgcatatcgtaaatgaagcaacagaatatgcagaaaatgctccgtatgcagcacctgaagatgcattgaagcacgtatacgcagaataggggggaacgtttcatggctgtaatgtcttatattgatgctattacattagcaatgcgcgaagaaatggaacgcgatgagaaagtattcgttttaggagaagatgttggtaaaaaaggtggcgtgtttaaagcgacacacggtttgtatgatcaatttggtgaagatcgtgcgcttgatgcaccgcttgcagaatctgcaattgctggggtagcaattggtgcagcaatgtatggtatgcgtccaatcgctgaaatgcagtttgctgatttcatcatgccagcagtaaaccaaattgtttctgaggcagcaaaaattcgttatcgttctaataatgattggacttgtccagttacaatccgtgcaccatttggcgggggtgttcacggtgcattgtatcattcacaatctgtagaagcgatgtttgcaaaccaaccaggtttaaaaatcgttatcccttctacaccatatgatgcaaaaggcttattaaaagcagccattcgtgatgaagatccagtattattctttgaacataaacgtgcatatcgtttaattaaaggtgaagtaccggaggatgactacgtattaccaatcggaaaagcagatgtaaaacgtgaaggtgatgatattacagttatcacgtacggattatgtgttcattttgctcttcaagcggctgaaaagttagcacaagatggcatctctgcacacattcttgatttacgtactgtatatccattagataaagaagcaatcattgaagcagcttctaaaacaggtaaagttcttcttgtaacagaagacaataaagaaggaagcattatgagtgaagtggcagcaattatcgctgaaaactgtctatttgatttagatgcgccaatcgcacgtcttgcaggtccagacgttccagcaatgccatatgcaccaacaatggaaaaattctttatggtaaatccagataaagttgaaaaagcaatgcgtgaacttgcggaattttaatcggggggactatacatggctgtagaaaatattacaatgcctcagctcggggagagcgttacagagggcacaattagtaaatggctcgttaatgttggcgatcacgtaaataagtatgatccgcttgcagaagtaatgactgataaagtaaatgctgaagtaccatcttctttcacgggtgttgtgaaagagttaatcgctggtgaaggtgatacgttagctgtaggtgaagtagtttgtgttattcaagtagaaggcgcagatgaagtagcagcaacagctgttgaggaaaaaacaaaagaagaatcaaaggcagaaatagctacgtctgaaaaagcaccgaaagtaaagcaaccaactgatggaaaaccacgtttttcaccagctgtgttaaagcttgcgggtgagcataacgttgatttagatctagtagaaggtacgggagcaaacggccgtatcactcgtaaagatattttaaagcttgtggaatctggaaatatcccacaagcaggtgcggcgaagaaagaggaagctgtagcggcagtagtagaagctcgcccagaagcaccaaaagcagcaccagtagcgcaaaaagtagaagctgcgaaaccagtttctgtacctacaatgcctggagatattgaaattccagtaacaggtgtgcgtaaagcaatcgcagcaaacatgctacgtagtaaacacgaagcaccacatgcttggatgatgattgaagtagatgtgacaaaccttgtgtcataccgtaactcaattaaaggtgactttaagaagcgtgaaggctttaacttaacgttctttgctttcttcgtaaaagcagtagcacaagcgttaaaagagtatcctcaaattaattcaatgtgggctggcgataaaattgttcagaagaaagatattaacctttctatcgctgttgcaacagaggaagaactatttgtaccagtaattaagcaagcggacgagaaaacaattaaaggtattgctcgtgaaattacagaacttgcaggaaaagtacgtacgaaatcgttaaaagcagacgaaatgcaaggtggaacatttacaattaataacacaggatcattcggttctgttcaatctatgggtattattaattacccgcaagcggctattttacaagttgaatcaattgtaaaacgcccagtaattatggataacggtatgttcggtgctcgtgatatggttaacttatgtttatcacttgatcaccgagtacttgatggtttaatttgtggtaagttcttaggacgtgttaaagaaattttagaaaacatgtcagaaaataatacatctgtatattaataaaaagctcgcttatgcgagctttttattatcttatttcttcatctacatcctactatatgtataaatatctttcccagtaatcttacaataaacgattatgtattaggaatttacgaaaatacattgctgatatatggtatatggatataaaataagaaaagaataatttttttggcaaatcttactgacgaaactgtagtataatatattgtattgtatgaaaaagagagttattctatataagtgttttatagataatgtgtaatcagtcgtcaaaacatgaagaatgttgactcctggttttttatttttgccgtaacaatgtttcaggaggatgtcatgaaaagaagtaccgagtttctaaaaagtttagatgtaaaattaattttaattttgtgtgcactatgtgtgacgagtatagctgctatatatagcagtcagcaaacgggacagtatggagctgcaaactttgctatgaaacaaggtgttaactacataattggggttgtattgttacttcttgttgcaagcatcgacttagatcaattgcaaaaattatcttggccgctttatattgctgggtttgcttcacttattcttttgaaagtattaccaccatcaggttttacacctgaaaaattaggtgcaaaaagatggtttgttttcccagtatttggacaaattcagccgtctgagtttttcaaaattgcattgctacttgtagtagcgagtatagcagtgaaacataatgcacagtatatggcaaggacattccaaacagatttaaagctagtaggtaaaattatgctagtgtcacttccacctatggcggttgtatatagtcaacctgatacaggtatggtgttcttatatgctgctgctattgcatgtattttatttatgtcaggtattcaaaagaaattgatagcattatgtacagttattccgttgaccatattatctgctttaatatttattttctttaagtatcaagattttttctataataatttagttactttactaaagcctcaccaacagtcgcgtattgtaggttggttaaatccatttgaaaatgcagatcaaggttatcaaacacagcaatcgattttagctgtaggtagtggaggaatggaaggtaaagggtttgggggaggaagcgtctatattcccgagaagcatactgactttattttcgctacaattgccgaagaaggtggatttatcgtagcagccttagttgtcttcttgttcctattactactatatcgaacaattattattggttattccgctgataatttatttggtacattattatgcgctggatcaatcggtatattaacagttcaaatattccaaaacatcggtatgatcgttggattaatgcctgtaaaaggtattgcattacctttcttatcgtatgggggaagttccttattctcaaatatgattatgatggggctcatattatcggtacggaaaacttataaaaaatatatgttttcagttaagtaaaaaaagctggttcgtttttaaacgaaccagctttttttacatatatgctcataaacgttgcaaactaaaacaggatagcagtttgagacgggtaaggagtgcaaagtgatgcatatgcatatttttgaaggagcacggcatctttctaatagtgaatgggttattcgggctattatagcatacatatttttaatattagttgcgaaagcgatggggcaaaggtctatcgcacaacttcgttttttagatgttgtattagtgttattgcttggtgggaatatttctaactcattgtctgatgaaaaagtagggttactgggatcgatgattacaacgttcatacttgttgtacttcatattataagctcagttttaatgctgaaatgggatagatggagacgttttttagagccagcacctattattcttatacataatggttccattgattttagcaatttgaaaaaggcgagaattaacgtggaatatttgttttcggaacttcgtatgcgaaatgtgagcgatattcaaacgattaaattagcattatgggaagcgaacggtgtcgtttctatatttcggtatccagaatatgaagcagtttcgcggcttgatcttaaagtggcgggaaaaaaatctccagtttcttttgtattagtaaaggatgggaggatacagaaagatgttcttgcattattaggaaaaacagaagcgtgggcgagagaatttctagaggagagtacagaagtcgaatctattatgttagctacagtagatgaatcacataaaataaatattttgttaaaaaaatgaaaaatatacgcattttgtcgtttcgtacatatgatacaatagtgtggacaacgaaaaaggaggcgatacggtgggatatgtagaagaattacgaaaaatagttggtcatcgccctttaattttagttggtgctgttgtactcgttataaatgaaaatggatatgttttattgcagcagcggacagagccgtacggaaaatgggggctacctggcgggctaatggagcttagtgaatcaccagaagaaacagcttatcgtgaagtatatgaagagacaggaataaaagtgaagaacttgcgactaatcaatgtattttctggagcgaactactttacaaaattagaaaacggtgatgaatttcaatctgtaacaaccgcctattatacggatgaatacgaaggggattttgttatgaataaagaagaagcagttcagcttaaatttttttcagtaacagaactacctgactatattgtaggatcgcataaaaaaatgattgctgaatatatgaagattatggaaaaaaagatataataatagtgaaagaaatacaaaaacacagctctggttggtagtccagacgcatgatttcatgtcagtaaccttcccctccgggatgtcccgtatttctaatcttttaaaggaggggctgtcaatggatttgacagtatatcacgatggccaattttttgttggaatcattacatgtaaagaaaaagggaaattgtatggagcgaggtatatttttgggtcggaactgtcagatgaagaagtgcttatgtttgtgaatggttcacttttagagcattttcagcactttgcaaaatgtggtgtagaagttaaagaaaaacagcgtcctaaaaacataaagcgtatcatacgacaagcagcaaaagaaacaaatgttaaacgttttactaaggcgcaagaggcaattagtttatcttatgaattgcataaacaagaaaagaaagtgcagtctaaagagaagcgagaagctgaaaaagaaagaagacgtttaatgaaagtactaaaagcaaagcaaaaacatcgtggtcattaaagaaaaggtgttagagcaagagctctaacaccttttctatacttaaatacaagtaaacttacttgtatttcataaacattaactggtaagatacaaataggtagttttagaggagggaaaagagtgattaattttaacttttttatgaatgatgttgtccgccaagcgcgtgaagaaattgtctctgctggatatacagaattgacgacgccggaagcggtagaagaagcgtttaaaagaaatggaacaacacttgtaatggtaaactctgtatgtggttgtgcaggtggtattgctcgtcctgctgctgcgcattccgtacattatgataaacgtcctaaccaccttgtaacggtgtttgcaggtcaagataaagaagcgacagcaagagcgcgtgaatatttcgaagggtacccaccttcttctccatcatttgctttattaaaagatggaaaaattgtaacgatggtagagcgtcatgaaattgaaggtcatgaaccgatgcaagttattgcaaaactacaatcgtatttcgaagagaattgtgaagaactataaaaaataagagaaaaggcggcacatccacaatcaagtggatgtgccgccttttttatttattattaaaattcatgagataatagttatgttattttatgcattattttatacataataagcagtgtttgtattgcttttttatttatttttattttatatattgcataaaaataaaagtgctgatacaatacaaacatcgaataaatattctattaaacttttaaatatacattattagggggaagaaagatgaagaagttagtatcaatatcgtttgcacttattttaattgtaagtatattcagcgcttgtagtaatggggaagaaaaggcaactggaaaaagtgaaaaagtactggttatggggacttcagcggattataaaccatatgaatacgtggaagcttcaaaaagtgatgaaattattggttttgatgttgatgttgctaaatatatcggaaaagaacttgggtatgaagtgaaagtgaaagatatggattttggtggtttattagcatctcttagttcaggaaaagttgatttcgtaatggcaggcatgacgccaactgcagagcgtaaaaataatgttaattttacagatatttattttgttgcgaaaaatatggtcatttctaaaaaggattctaacattaaatctgtagaggatttaaaagggaaaaaagtaggagtacaaacagggtctattcaggaagagaaagcagcagaatttaaaaaacaagtagatttccaagttgagggacgtgaccgtataccagaaatcgtacaggaaattaaagctggtcgttttgatgctgcaattatagaagacacagttgctaaaaattatttagagaaaatgaaagatttacaaggaattgaaattaaagaagcaccagaagaagttggagcagcaattgcccttccgaaaaacagtgataaaacagctgaatttaataaagtaattaaaaaaatgcaagaaaatggagaaatggataaattagtgaagaaatggtttggcagcggaaaataagctgcctttcacttttctgtgaggggaatgaaaagaatgaacttagatttttcggcgattacgccttcgataccatatatactaaaaggtttagaagttactttgaaaattgtagcagtatcagctttagcaggatttattttaggaacgctattagcactttgtaaaattgctagaatacgagcattaaatatagcagcagatttttatacatcaatttttcgtggtacaccccttgtattgcaattaatgattatttatttcggcgtcccacaaataattggttatgaaataccagcattcttagctgctgtacttgcatttagcttgaattcaggtgcatacatgtcagaagtaattcgtgctggtattcaagcggttgataaaggacaaacagaagcagcaatggctttagggataccgtacggaaaaatgatgagaaatattattttccctcaagcattaaaaaatatattaccagcgcttgtgaacgaatttgcgacacttacgaaagaatcggctgtagtaacagtaataggcgcgactgatttaatgcgtcgtgcttacattgtaggcggtgagacatttaaatatcttgaaccattactttttgttggactgatttattatatgttagtcattattcttacattagtcgggaaggcaattgaagggagaatgaagaaaagtgattaaaattgaaaaccttcataaatcatttggtaaaaacgaagtattaaaaggaattacaacaacgattgaaaaaggggaagtagttgcaattatagggccttctggatcaggaaaatcaacatttttacgttgtatgaatatgttagaagcaccaacgaatggtcacatttggattggaacggaagaagtaacgaatccgaaaacgaatgttatgcatgttcgtgaaaatgtcggtatggtatttcagcattttcacttatttcctcatatgactgtattagaaaatattacgtatgctcctatcaatgtaaaaggggtaacgaagcaagaagctgaaaagaaagctgagaaacttttaaaaaaggttggattagtagataaaaaagatacgtatccaaatcgtctttcgggaggacaaaagcaacgtgtagcaattgcaagagcgttagcgatggaaccggaagttatgttatttgatgaaccgacatcggcgctagatccagagatggtgaaagaagtgttagaagttatgaaatcgttagttacgacaggaatgacgatggctatcgttacacatgaaatgggttttgcaaaagaagtggcagatcgtgttattttcttggacggaggaaagcttgtagaagatagtgcgccagaagaattttttgcagcgccgaaaagtgaacgtgcgcgacaatttttacaaaaaatattgtaatatgaaaaggttatgtgaataataagtagaaaaggatgacattgtgtcatccttttcttatactagctgtaaatacgtttatacatataggagtaatgatatgtttaaaattggatatcgtacagtaaaaacagcaatagggacaggtgcggcagtttttattgctcagttattagggttagaattttatagttcagcaggtattttagttattttatgtgtacaaaatacgaagcgcaaatcacttcaagtgtcgttacatcgttttctagcgtgtgtattatcaatggcattcgcgttttgtatttttgaaacgattggctatacaccacttgcaattagcatattgttacttacatttattccgactgcagtaatgcttaaaattcaagaaggtattgtcacgagttcagttattgttatgcatctatattcattgaagcaaattacatggcttatagttggaaatgaaattgctatattaacgatagggattagcgtggcgttattagtaaatatgtatatgccgagtagtgaaaataagctaaaagagtaccaggataaaatagagagtaattttaaaacgattttgtttgaaatggttgtgtatttacgaaatcgagaaagtagttggagtggagcagaactcattgaaaccgagaatatgttaaatgaagcaagagatttatcgtttaaaaaacttgagaatgcatttatgcgagaagatgattattactatcgttattttaatatgcgtatgcaacaattcgaaattttagagcgaatgataccactagcagcttctttatcgtggacatatgaacaagctgacatgattgcagatgttgttgaaaacattggtaatgctattagccctgaaagtactggcgttatttccttaaggcagcttcaagaaatgagggaattatttagagacatgccattgccagctacacgcgaagaatttgagatacgtgcgaaacttgttcaacttgtgtatgaaatggaacaatatttactcattaaaagtcgctttaagggaaaggataatataaaagaacttatatagaaggtaggaattatctatgccgtatcttctctctatcatattatgtctttctttatcaccgatttggcctcttggggataatccacgtgccggagatccttttattattgtaaataaagcaacgaataaattagcttacattgacgatggaaagattcaaaaggtttttccagtagcgacagggaaaacgaatgaattaactccagaaggaacttttgatgttgtaatgaaagcaaaggatccgtattacattgcgaaggatattccaggtggatcgccaaaaaatccacttgggtcaaggtggattggatttaatgcaagaggaactgatggaagtaaatatggaatacatgggacaaaccaaccgagttcaattggaaagtatatttcacaagggtgtataagaatgaagaaaaacgatgtggaatatttgtttgatcgcattccaattggaacgaaagtatggattgtgaaatcgaaaaaatcatttcagcaattggcaaaagaaaaaggagccgtcgcatatgaaaaagccaacgaaaagggtggctttttctattataataagttgtcttgacatgtgtacataaccgtgcgttaatgagagtatagaaagataaagttagataaaggggttgctcatatgtacttgaatccaaaactttcgtatatgcagttttttatgggatttctatttgttattacattcatattggcaacttttaatatatgttcttatcttgtagcgattgtatgtatggcattacttaatctcacttttgttattggggcatttcagcagaaacaatatacaagttttgtaatagcgcttgtaatgtcattttcctttagtattgtagcgattgtgttttatataaaataaaccatctcgatgtcgagatggtttattttgttatgtgtaaaaagtaaaaaaaggacgaacacatcgccctttttaccaaaacatactcgcgccagcaagtaatgttgttacaagcatagaaattagcatcacataaaccataactttttgagcttttttatgcatcgttatacctccttgcaaatcagtacaatttcattgtaacgagaaatgaaattatggacaaggggagagtgaggacaaaattcgggaggggattgcaaaatataacaggaaatttgagagtgtgtagagaatatagtaaaagggtatattgttaatttttagttgggcaagctgaagaatggagatacgatgatgaaaatatacgaaacagatcgtttatacttaagggaaattgatgagtcgtatgctgaaacagttcttcaatattacgacagaaatcgtgaatttttaaaagcttgggaagagtatagaccggatgatttttttacgctagattatcaaaagaaaaagttgcaaaaggatagaaaagagttcgaagaagggaaaatcatcagactatggatttttaaaaagggtgatgatacgaaaataattgggtgtatttcatttaatttaatcgttcgtggcatttatcaatcttgtgtactcagttataaattagataaagcagagttaaacaaagggtatacgacagaagcgcttagaaaagcaattcaagttgcttttggggaatttcagttacatcgtatagaagctccgattatgcctcgtaatttagcatctatacaagtagtaacgaagataggttttcaatatgaaggcgtatctaggaagatgttaatggtaaatggcgtgtgggaagatcatatgcgctgggtattgttaaatgagtaatagaaagcagatggttatctagacatgtaaaccatctgttttttgtcttgtatttcgaaacttttgcgaaattctgttataattaatagtgttacatacataatggtagtgcaggaggcgcagtcttatgattaatcaagaacgtttagtaaatgaatttatggaattagtacaagtagattctgaaacgaaatttgaagcagaaatctgcaaagtattaacgaagaaatttacagatttaggtgtagaagtatttgaagatgacacaatggctgtaactggtcatggtgcaggtaacttaatttgtactttaccagcaacaaaagatggtgttgatacaatttactttacttctcatatggatacagtagttcctggtaatggaattaagccttctattaaagatggatatatcgtatcagatggtacaacaattttaggtgcggatgataaagctggattagcatcaatgttcgaagcaatccgtgttttaaaagagaaaaatatccctcatggtaaaattgaatttattattacagtcggagaagaatcaggtcttgttggtgcaaaagcattagaccgtgagcgtattacagcgaaatatggctacgcattagatagcgatggaaaagttggtgaaatcgttgttgcagctccaacacaagcgaaagtgaacgcaattattcgcgggaaaacagctcacgctggtgtagcgccggagaaaggtgtatctgcaattactatcgcagcgaaagcaattgcgaagatgccacttggtcgcattgactctgaaacgactgcaaatattggacgttttgaaggtggtacacaaacgaatatcgtttgcgatcatgtacaaatctttgcagaagctcgttctttaatcaatgagaaaatggaagcacaagttgcgaaaatgaaagaagcatttgaaacaactgcaaaagaaatgggcgggcatgcagacgttgaagtaaacgttatgtacccaggatttaaatttgctgatggtgatcatgttgtagaagttgcaaaacgtgcagctgaaaaaattggtcgtacaccttctcttcaccaaagtggtggcggaagtgatgcaaacgtaattgcaggacatggtatcccaacagttaacttagcagttggttatgaagaaattcatacaacaaacgagaagattcctgttgaagaattagcaaaaacagcagaattagttgttgcaattattgaagaagtagcgaagtaatggaatagaaaaagcgtgtaaatcaattgtgatttacacgctttttattttgattcgattgctttgacaagacgtataagccaatataagaaaacctatggaagtatatacgttgttgctacatgtactagacgaaggaataatcctaacgtattcatattgaaaatcggaagtagtaaataattaattgcaatgattaatataactacaaggaatgtataattgagtttatcccgctatttgccggacagtaagccccccacctcaaaattcagcgaaagtaaagaatttaggtgagggctgattaaagtttcactttattagttgatctcatcataatcagaccctttcacatatatatcctctttatatcgattataaaaagaacaagtaattattataactattgtgcaaaatttgatataatgaaagaacgaacgttctgattagggagtgagtactatgcgagaaatgtatccgaaaaatggtcgtgttattttacatgtagatatgaattgctttttcgcatctgttgaaattgctcatgatccatcattacaaggaaagccattagcggttgctggaaatgaaaaagagagaaaaggaattattataacatgtagttatgaggcgagagaatacggaatacgtacgacgatgcccctttgggaagcgaaaaggttatgcccgcaattagttgtaaggcgtcctaatttcacattatatcgcgaagcttcatttcaaatgtttcaagtcctttcccgttttacagaaaagatacaaccagtctcaatagatgaaggatatttagatattacagattgctacgcactcggttcgcctcttgaaatagcaaagatgattcaacaagcactattaacagagttgcagcttccgtgtagtatcggaatcgctccaaatcttttcctagcaaaaacagcttctgatatgaaaaaacctctcggtattaccgtacttcgaaaacgtgatattccagaaatgatttggccacttccagttgaagcaatgcatgggattggagaaaaaacagctgaaaaattaaatgaaattcatatacatacaattgaacagttagcgaagggagacgagcatatcattcgcgctaaaattgggaagcatggtattgatttacaaaagcgtgcaaaaggtatggatgatagggaagtggatccgagtcaaatgggccaacataaaagtgtcggtaactcgatgactttttcaaaggatatggatgaagagaaagaattgcttgatatgttagaacggttatcaaaatcagtgagtaaaagattacaaaagcgaacccttgtcagctataatattcaaattatgattaaataccatgataggcgaacagtaacacggagtaagcaattgaaaaatgcaatttgggaagaacgcgatatttttcaagcagcatcccgtttatggaagcaacattgggatggtgattccattcgtttactaggtgttacagctactgaaatagagtggaagacagaatcggtgaaacaattagatttgttttcatttgaagaggatgcgaaaaaagaaccactacttgctgtcattgatcaaattaacgataagtatggaacaccgattttacaacgaggtagtcaactactacgtaagcaagagaagtcgtttcaacaaaagttagaaaataagtttatgtagaaggtgtcatgaagtagtaaaatcatgacacctttcctgtttaactcgcttctaaatttaaagaagtcttccatccagctccagtaacgccagactctaatagcattctacttactattttttcaattaagatagccgcatttgtcttgcaatgtaatgtagcctgtatacaaactttttgattagaatctacatcttcactatacaattcttttaaaccgagcccttctgtacttaccatatgcataagtaaaaaacgaatatgtgcttcattttcttctgaacaagtaagggaaagtaagtagttcgtttgttctggtgattcttcttttgattttttattcataaaaagagcaattgggcgaagaagtatatttgctagtaacacgccagctgcacctaatatagctgcaacgaggaaaccggcgcctgtaagagtaccgacagcagctgcacaccataaagtagctgccgtatttagccctctaatactaaaaccatcgcggataataacgccaccccctaaaaagccaatgccactaacgacttgagcagcaatgcgggatgggctagcatcatgatcaagcatgacggataataaaacaaatatacaggcaccaagtgatacgagagcatttgtccgtaacccagccattcggtgtctccattgtctttccattccaatgcaagctcctacaataattgcgataactaatctgaatacaatgtcgtaccataccatcatggtcacctccatatataatatgtgttatgtcttttagaatgagcggggaatacccactcattcttatttttacaaccagctatgaaactttttaatataaagctttttcaggaattgtgttaaaaaagcgtagcctaatagtattcctactaaccaagggaagtagttaagtggcaatgcttgtaaaccaacggctgcaccaagtggtgagaatggaatataaatcccgattgccataataagagcggttaataaaacgactggtgttgatgcagtgctttgaataaatggaatcttttgtgttcttatcatgtgaacaattaaagtttgtgttaacaatccaacgacaaaccaaccggactggaataatgattgctcgctcggtgtatttgcaccaaatacattccacatgactacgtatgtgataatatcaaatatggaactaattgggccgatacaaataatgaagtttcgtaagtttgcagtatcccattttcgtggtttttctagaaactctttatccattttgtcccatggaatagaaagttgtgaaatatcataaagtaagttttgaattaaaagatgaatggcaagcatcggtaaaaaaggaatgaaagcacttgctactaacacactaaacacattaccgaagttagagctagctgtcatcttaatatattttaaaatatttccgaatgtagtacgtccttctaaaatcccggcttctaatatagttaaacttttttcgagtagaataatatcggaagcttctttcgcaatatcagtagcagtatcaacagatattccgacatcagcttcacgtaatgctacggcatcgttaatgccgtctcccatgtaacctacagtgtgtccatttccttgtaatgcgtgtataatacgagatttttgcattggattaagcttcgcaaatacagtcgtttcttcagcaagttttgctaatgctttatctggtaaagaatcaatctcgtaaccgaggattggttcgccgatatctaatccaacttctttacaaacctttcttgtaacaatttcgttatcgccagttaaaattttcacttgtacaccatgtttttgtaatgcttgaattgcagctgctgcagatggtttcggtggatctaaaaagccgatatatccagcgagaatcatatcagtttcgtcttttactgcgtactctttatcatttattcttctatcttttttataagccacagcaataacccgcataccttcactatttagtgtctcacttagttttttgacatttgaacgtatttcctcggtgagtgggacgattttttcatccacttcagtgtagttacaaattgataaaatttcttctacggcacctttacaaaccattgtatgttcacctgaactatcctttacgatgactgacatacgtcggcgggcgaaatcgaatggaatttcatctagcttttgaaaagctaatggattaaatttattgttttcctctgtatgcttaataacagctttatctattaaatttttcaatccagtttgatagaaactatttaaataggcaaattgcaagacgcgattgcattcattccccttgggatctaagtgacgaacaaggaccactttatcttctgttaaagttccggttttatctgtacaaagaatgttcatagcacctaagttttgaatagaatttagctgttttacaattactttttgtttagacatgttaacggcacccttagctaaattagcagttacaatcattggtaacatttcaggtgtaaggccaacagcgacggcaatagcgaagaagaaagcttcttgccaatctccttttgtgaatccattaatgagaaggacaataggtgccataataagcatgaatgtaattaagagccagcttactttgtttacacctttatcaaagcttgtttctacacgctttccgattaccttatttgctaaagagccgaaatacgtatcggtacttgttgagatgacaacagctttcgcgctgccacttacaatatttgttcccatgaaacaaaggttttccatatcgagtggattgtaattttttttcatgtttgtcggtaagatatgcttattttctgtatgatagcagtgttcgtatttttctacagggagtgcttcccctgttaaagaagattgattaacaaataaatctttagcggatacaatacgcacatcagctggaacgatatcaccggctgaaagggaaataatatcgccaggtacaagttcctcaattggaatttctgttgtgtaatttcgatttaaattcgttacattttttgtttcatgtacaaatccatttattctaaatacgctcgcagttgttcgaaccatagcttttaacttatcggcagctttttgagaacgaaattcttgggaaaaccgaattgttgcactaagtaggaccattgcagatacgacaattgttccttgtatgtcatctgtgaaaaaggaaagggctccaagagctaataaaacgaaaataaatggatttttaaatgccagcagaaattgaatgtaccacggcgccattttattatgagctatttcgttcggaccgtataaagaaagtctacgagacgcttcttgtttagataatccatcttgtgttgtttctagaagttttaacgcagagcttacatcatgtgttgcaacctccactaataattcgttatttgtttgcatgctatcttgctcataagcatgctttgtttcttgtctttgtaaattaaacatcagtagttcctcctctgtcatgaaagaggaaacaatctgttacctaactatttgaaatggtgaggaacagtttctttcctacctacatgatgaaatatgaatgtaaaacgtatgggtatctgggccgaatcatcaattgccaactgttcctcacctccgtacaatttagtagtttctgaatatgctatgtttgtttcatagtaaggtgcatatatacgtaaaaagacctttactcaaaacgagtaaaggtctgaattcgcagttaaaagagtctacaacaaagactgttagtaaacataaataaaaacagtttttgtgtatgacaaaatacatgcacctctccctcgttgagttttagcactgtatagcataggtactgaaaccagctacgttaaaaaaggccttcattccgacctttcctgttgacccattggcgtctctcgacatttttgggcagcagcgtttctctatacaggagcctcacctaacagagaccatattcaattacatgttgatgttagcactgtaaaatcgtagtgtcaatatcttttttatctgtgtttttaaaatattaaatggatttataatagatatatgggatgaaatgcatgatattgattataaataatatggaaaataaatatttttataaaaggggaatttgtaatggtaccacaaaattttattataaatattgagaatcaaaaatggttgtttaatgagcaggaagatttatgttctcatggagaaatatatttaaatatggctggaaccattattacgcaggcaggtatggatgaggaatggggaataagtgaatcagctttagctttgttacgaactttagataaagaatatatttgtgatattaaaaatgaagaggggcttattttgcacggatgtggcactatgctaatgttaggatgcccaatttcaattcattggactataaaccatataagtaaaaacgtgattttaaaggactttgtcaaagttatttctactgatcaaaaggctatatactatgaagggcttcatatagaattgaatgaaaatgaatatagaagacaaattgtttcttttgcattacaagcaaaagaattatttaataaatcaagtgacaagataattttagatgagtttgatcaaaggatgtatacaaacttttggacggaatatgacgatttactaaataagtataaataaaaaagcactgtaaccagtgcttttttatttatagattacgagattgtagggttttcaaaaataacaatctctgaactgtttgtagttgaaacacgttgggcgtaatatgttaaagctgaagaaatatatgctggtaacgtatcatttgtatgtgatgttgtatattcatggattaattcctttaaagttgtccattctaattgtgctgggtgatcagacacgaaagaacttacccagcgatcaaatgaagatgaaaaatcagtttgtaaacgaaatacttctttcataataaaacgctccctcgtatagtatgtttaaacttaatttttttactttcatgagagacctgtaaaatgtgttgaataagtttgttccccgattttatgtgtttcaatcgttccaatctctagtaccttttcaattgcttctcttgtcatagtcattttttatttccccttttcttaattagatttacttttcatataatcgattactaccgtttgcttttcagcaacctgattttgttccttctcttctacttcttctacaggttgtccaacatctgttttcacatcaccctgtagatccatataaaactgtccctggatcccggaagctaactcttgaccaactaaatttccgttttggtccatatctaatagaatcttagactctaccgcttctgttggtgctagtttcgaagtggcttgaacctgacaattccatacatcacgctttttatcaccagcaaacgaaagtgttaaaacaatctttcttgcttttttaggatcagtatttaaatccgccatattttccattacacgctcaaactcttgatgaaatctttcagcaagtgctccatcagcaaatgtatttaaatcaatcatgacttccattatttctctcacctaatccttccttcttaaaattcaacatctacttgaatatcaatgttcataggtatttcttgcgttacacgaattgattttggacttacacctttttgaatcaactttttaacttcttcttttgcagcttcttttgtgtgaaactcactgatacctggaaaacctgcgaaattactagtaatcactaaaatcttttgttgcatgtttgctcctcctactgaacttccgccatatttatttgtgcatttgtagctgtaatttcttcttctaaaatgattggaagtgaatattcttcattaatgatttgaatcgctctatctaaatgatgacgtttaatagctttataactactaattccaaactctctatgtaattgactataaatatcgctatacactttttttctaaggctaacatccctataagcattagattccttaccacctaatagaagaacacctaactttcttacaacctttgatacttcatcacattcgatagcatataaaggggcgttttctcttaaatccttcacatcggatttaatctcctgaatttcctgggtatgtccttctaaagcttgaaacgttaactttaaaactcccattggatctgtaggtattttttgttgattttgtatatgttgcttcattcgtttaaactcttcaataaacttgattttcatttgaacagcttcttttgtgttataactcattacaactaatgtaaaagcttcttctgtcagatcgattttaggataacgacgccctctattttcataagttcgctccttaaaattcaggagtgaaaattcataacctgcatactccatttgagttctgatatcagccataacattgtcatgacgtttattgaatacttccgcaatcttcaagctatctgtaacaacttttccgttgttttcaaatactagtgcttgttcgtttgctactgttaattgatccatattactttcctcctctacaaactcggaataactttagttttatccgtattacgatgtaccaaatgcaattcattacttacttttttaaaaatcaaccaattatcaggattcaaattgtatgatttaatatgaaccttttctttttttgttggctttttaccatttttcaattaactcacttcccttttgctcatgtcctttaatttgcagaaccaatatttatcgtcaaatttcgcgaatatgttaaaaaaattatttactttcattttttatatttcgttgttccacttttctttgaatgattaactctcgtgcagctggtattagcggtgttaaaaattccttccactgttcccttgtaaggattactttcaccacatacccattttcatcacgaataatttgtcccccactcatcctcaatcacctcaatgcatctatatgtttgtgggacactaggactatccatttaaatcaaaatttcatgaaacaatattcttcaaattattcgctctctcttgaacgcgttttttcataagtacgaatttttcgtacttaggtccaaaaaatatatcctcataaggaacatcaaataagtacatgtactttttgattaattcatctggaatgtttgttgaatcttgttcatataaccatagggtttttggggatacttctaatatatccgcaagttctgcttgattgaaccctgcactttctctaagttcattcaatgttcttttcaagtaatccattttgttacccccttccttcaatatttattgtattactaaatttatgtaatttcaatacaaaagtacgaaaaaatcatacaaaacgaacactttacgaataattcgtaatgtgttatattaaaaatgtagttacaataggaggtgacggtatgactgatttacaaaaacaaactatagtaaaaaacataaagaaatttttaaaagaaaatgatatgactcaatcggatctagctagtcaaataggaatcgcaagaagtaccttaagcgattatatgaattacagagccaaaccaagttcaggggttttagaaaaaatggctactgtgtttggagtgacaaaatctgatattgatacaacttataagaattcaaaagttgaaattgtagatggagaactccaattagttcaagaaaaacctactgacaatgaatcaaaaaaggaaatccctattattggtaaaatcgcagctggcgttccattggaagctgtacaagatatagttgatagaattgcacctccatacaaaactcacaatatcgatgaattattcggacttgttgttaacggtgaatccatgaataaaattgtccctaacggccattacgccgtactaaaaaaacaacctgatgtccaaaatggagaaatagcagctgtaattgttaatggacattacgcaactttaaaaaaggtgtataaatttacagatttaatgattttagaaccttgttcacatgatgaaagttttaaggaccaacaatactcacaagataactgcgaggatataaagattataggaaagtttttatacagcgtaagtccaatcattcaataattaggcggtgaaaaggtgtatgtagtcggcaagtgtcgactgaatgaaatattgaaagaaaagaaattaactcaagtagatttagcactgaaacttggcatggctaaacaacaaatacattcttacgcaaacaatgacagggttatgtcttatcagaccgctaaaaacgttgcttctcaactcaatattaatatggaagatttatacgaattcattcagtcggaaaaacagtgagtttttctcactgcacctgaaagtcaactacttgattgacctcaattcataatgcaccttattgaaacttatattttcacatagtattcgtctaataaattaaaaatatacataaaatattgattaagaaaggggtttagttaatgaaatgtgtcatttatagacgtgtatcaactgacatgcaagttgaagaggggatttcattagatatgcaaaaacttcgtcttgaacaatacgccaaatcgcaagattggatagtggtaaatgattactgcgatgaaggatatagcgccaaaaatacagaacgacctgcttttcaacaaatgataagagatatgaagaaaaaacaatttgatattattcttgtttacagattagatcgctttactcgttccgtttcagacttacattcaattctaaaaataatggatgaatataatgttaaattcaaaagtagtacagaaatatttgatacaacaaccgctactggaagaatgtttattaccttagttgcaacacttgcacaatgggaacgagaaacaacagccgaacgtgtacgagactccatgcataaaaaggctgaattagggctgagaaatggagctaaagcacctatgggatataacctaaagaaaggcaacctatatatcaatcatactgaagcagaaattgtaaaatacatattcgaaatgtataaaacaaaaggtgtagtaagtattgtgaaatctttaaacagtcgtggtgttaaaactaaacaagggaaaatatttaattatgatgcagtacgttatatcataaataatccaatttatattgggaaaattcgatggggagaggatattctaacagatattgcccaagaggattttgaaacttttatcaataaagacacttggtataccgtccaacaaatacaagatagtagaaaggtaggaaaagttagattgcaaaattttttcgtattctctaatgttctaaaatgtgcaagatgcggaaaacactttttaggaaatagacaggtaaggtctcataacagaattgctgtgggttatcggtgcagctcaagacatcatcaaggaatatgtgatatgcctcaagttccagaaaatatacttgaaaaagaatttctaaaccttttagaagatgcagtcgttgagctggacgcttctgatgaaaaaccagtagagttgagtaatttacaagaacaatataatagaattcaggataaaaaagcacgtctaaaatttctattcatagaaggtgatatccctaaaaaggaatataaaaaagatatgctaacactaaatcaagaagaaaacataattcaaaagcaactcgctaatataactgacactgtatcttcaattgaaataaaagaacttttaaatcaattgaaagatgaatggaacaatttaaacaacgaatctaagaaagcagcagtaaatgcaattatatcttctattacagttgatataataaaacctgctcgtgcgggtaagaatccaattccacctgtaatcaaagttatggatttcaaattaaaataaacacaacctaactgcatttatttaatgtagttaggttgtgtttaattgaccaaaccatggtgtttgaaatgcactgccgccagactgaatcaatccgctcaactgctctttatcaaacagttcgtgtaaaatcgaacctttatccgttaatagattttgaagccatactgttactgcgtttgtatagtgtggattgtgcgttttcggatacggactcttctttctatataagatgtcatgcggaagtacatcttctaacgctttacgtaatagacctttttcgcggtttttatacattttcatttcccaaggaatattccacgcatattcgacaagacgatgatctgcaaatggaacacgtacttctaaacttgcccccatactcatgcggtcttttctgtctaataatgtggtcataaaccataccatatttaaataaaataattggcgtctttttgcttctagcggactttccccctctaaaataggaacttcttgaatcgactcttcataacgcctttgtacatattgttgtaaatttaatttatttctccattctttttttagaagttgttcacgtgcctctgtagaacgcatccatggaaatgcactcgattgtaaatcatcttctctataaaaccacggatatccaccaaatatttcatctgcacattctccagataagccaacgacaaaatcttgtttaatttctcggcaaaaccataataatgacgaatcgatatctgccataccaggcaaatcacgaacaagtactgcttcagttaaatactctgctaatttttcattcgaaatgacgcagcgatgatgggttgtttgaaatgtctcagtcattaaattaataaacggagcatctgaatttggctggaatgcatttgctttaaagtatttgtcattatcttcgtaatcaatagaatacgtgtgtaattgcccttttcccgatctctcatattctttcgctgcaatagctgtaatagcgctcgaatctacaccacctgataaaaaagtacatagtggtacatcagaaacaagctgtcttgtaatagcatcttgtaataaaaagcgcgttttctctactgtttcttcaaaagagtcttcatgttttttactttccacattccaatatctccatatacataaaccgttctttgaaaatgtcatcgcatgacctggacgtaattcttttataccagcataaataccgtggccaggcgttcttgacggtccgagtccgaatatttctgataacccttctaatgttacttccgccttcacatctggatgcgacaatatcgcttttaactccgaaccaaataataagcgtccgctatcatatttataaaaaagtggctttacacctaatcgatctctcgcaataaatacttgttctttctgttcgtcccatactgcaaacgcatatataccgtttaaatgatcgacacattcttctttccattcaatataagaagctaataatacttctgtatcagaatgacctttgaacgtataccctcttcttaataattcctttcgaatgtcttctgtgttataaagttcaccgttatagcaaatggcataattcgtttcatcttttaaacaagtcatcggttgtttccccccctcaggatcaacaacaattaaccgtttatgcccaaatgcgacatttcctttaatccaaattttattatcatccggcccccgcttcgctaacgtctcagccatcttcgtaacgacatctctttctccttctaatgagcgtttataatccacccatcctgtaatcccgcacatataaatcatccttccatcttatttcttttcttgaacgtgcagtaatccccaccctaagagtgcggatcaaaaaataaaaaacttgacgataacctactatccacatatggaatagcattctcactcagtaaaacgtgttttattgtatgcccacctatgtctagatgtgtctagttataaagaacgcacgaactgtctataacaggaataactacttttcataaaggagaaatcgtatatgatacaacgtaaacatattttatataaccagccccgtgctcatacagtcggtaatgtagaatatataaacaatgaatgggtattctttgatgatgaaaatgatgaagcgtttctattagaagatattgccgaagatgggtttgaaattttgtataataacaattggttaccagcccgtttctatgaacaagatgtattacaaatcgccaacgagcaacaccatttgcaaaatggtgaaatggtacgtattcgaaaaaagttacttcttagctataatgaatggctcgaggaattacctgactctgtcttcacattattaaccgaatcattgcaatcacttcactactctttatatgattgcatgtattgtcataattatttatctttcttaccgaaagaggagtcacgcgaaggagtaaatattcttttgtttgataacgacgaaatgatctgtacactgcagcaccatttcgtccgtcacactacgtcaaataaaaatatgttccgttttacgaaagtaaatggagaagagttgcatatcgatgcgacataaaataaaaaaccaccttatctcccaagtctttgagattataaggtggttttatttttatttgaatacgtaccagccaagtggcaatttcagtcctaagtataatactgctactagcgcaacaataaataagccccaaaccgcccctgttggtttgtttttgctcatttttacaagaaccatttccattccgccgataactaaaataccagctaacattttcaagccataccacatgtgcatgctacctgttgctgtcttcacaatactcatgtacaacatgaagcctgtcacaataatgatgatatacattaggcgaagccccatatgtacacccttaccttttcttcctgctgaataaagtgaatacgcaacgaagaataaaattaaacctaacgcccatgctgtaatatgcatatgtaccatcgtatcccttacctcctcttttcacactttttcactctatatgataacatgttcatttattttcaggaaatgtttcgcttttttacatttaaatgctataatatttagagtatttacaaacttcttgtaataacaaaagggggaacaatcatgattcaaactaaggatattatcgaacttacagacacatacggagcaaataactatcacccacttccaatcgttatttctaaagcagaaggtgtttgggtagaagatcctgaaggaaaccgctatatggacttattaagtgcatattctgcagtaaaccaaggtcatcgtcacccgaaaattattaacgctttaattgaccaagctaatcgtgttacgttaacttctcgtgctttccatagcgatcaattaggtccttggtacgaaaaagttgcgaaactaactaataaagaaatggtacttccaatgaatacaggtgctgaagctgttgaaactgcaattaaaacagttcgtcgctgggcttacgatgtgaagaaagtagaagcaaaccgcgctgaaatcatcgtttgtgaagataacttccacggacgtacaatgggttctgtttctatgtcttcaaacgaagagtacaagcgtggattcggtccaatgcttcctggcatcgttgtaattccttacggtgatttagaagcattaaaagccgcaattacaccaaacacagcagcattcattttagagccaattcaaggtgaagcaggaattaacatcccaccagctggttacttaaaagaagcttttgaagtatgtaaaaaagaaaacgttttatttgtagcagatgaaatccaaactggcttaggccgtactggtaaagtatttgcttgtgactgggacaatgtaactcctgacatgtacatacttggtaaagcacttggcggcggcgtattcccaatctcttgcgtagcagcaaaccgcgacattttaggcgtattcgagccaggttctcacggttctacattcggtggtaacccacttgcatgtgctgtttctatcgcagctcttgaagtgttagaagaagaaaaattaacagagcgttctcttcaattaggtgaaaaattagttgggcaattaaaagagattgataacccaatgatcactgaagttcgcggtaaaggtttattcatcggtatcgaattaaacgaaccagctcgtccttactgtgaacaactaaaagcagctggtctactatgtaaagaaacacatgaaaacgtaattcgtatcgcaccacctctagtaatctctgaagaagatttagagtgggcattccaaaaaattaaagctgtattatcgtaatgatagagaggttgtccgacatgttgggacaacctctttctttttatattcatttacattaagataattttgtaattttctgtattttaaaatcgtaaaggaggtgcgatatgctattaagatatggtaaacatattaactatttagctacatcttttattttagttacattctttggcttcctactttccacaacatggcttactcactactcaactcctactacattcacactactgaaagcatcattttggactgctgttattcttactatcattggttttggacgagaaaaaagcgcacttacggttatactatttggcatttgtacacttgcattcattggtctttacactttttccgttattgattacctctataacccaaggccataaaaaagagctatcttttaacaagatagctcttttcttcacttcactacatttcgcaaagtaccaattccttctactgtaataaccacttcatcaccagcatgtaaaaacttcggtggtgtgaaaccttttccgacaccagccggggttcctgttgcgataatatcgcctggttctaaagtcattcctttacttatcgttgaaataatttcttctattgaaaaaatcattttatttgtgttggaagtttgccttacttctccatttactaccgtttcaatgtgtaatgcattcggcgcattaaccaccgatttatgaattaaatacggtcccatcggacaaaatgtatcgaagcttttcccaaggaaaaactgtttatgttttctttgaatgtctcgagctgttacatcatttataatcgtataaccaaaaacatgctcaagcgctttttctttttttatttgcttccctcgcttaccaataatgatagctaattctccttcgtaatctagttcgtccgttgcatgagggtgaccattaatttgctcatttatgccaataactgttgttggtgctttcgtaaaaatcattatattttctggaatagactctattccgcccatttctatggcatgctcacgatagttttttccaacgcacaaaatattctttcttggccttggaatcggtgctaatattttcacctctgttaacggataatacgccgcttccccgttctcttttgcccaatttacaatttcacatactttctcaaagcattcagttcctctttcaatacactctaacattgtaatagggattgtaaccttttcccctttttgtctttgcgcttctcttaagtgtaatacctttttttcttcttcatccacaatacctacaaataccttttcttctttcttcgccgttacaaaacgcaatatttccactctccatcctaaaactcatgccctttaattgtattcgcatccgtaagaaaaaaaccttctcatacacgctaatttttacaatattcttctcataccctattcgttacgcctttatatttggcataaaatgtagaaattttactttttttagcgaaggtatttcttttttatggagtttttgtataatatgtactacatatatactaaaaatttcatttagagatggagccgatttcaatgtttgagcaagcgattgaaaaaaaacgtgaaaaaatgatttattttgctgaacgctatggaatgacttctcaaaaaacagtggattgtagccaagaactggacaggctcttaaatgtaatttggcatgtacatacggattttcacccaaatcaaacactcgacacacacacgcaatagcgtgtgtgtgtcttttatttcaaaaaaacacacattttattgaaaacgcccatacaatagtagaaaagaaaattttaaaaacgaagggtgttttatatgccagctatggtcggacatattcgtatcgtcaatattggatcaagtggtatttttcatattggagatgtatttgcgattaggcctattagttactcacgtgctttcgccggggccggctctttcaacgttggagacaatgtttctgtctacaattatcaaagtgcaacgactgtcaacgattcagatgtaatcgatcaagcgataattggctcaacttaaaggaggcaattgcattgaatttttatgtaaaccaaagtatcatcatcaacagtattaaaattgatagcattacaacctcttctgtgttccaaattggtactgccggaagtattaaagccctatctaaattttcaaatacgggcggatttacggagccgcttcgcccattacaggcgaaaggacaaattatttctatcaaaccatcaactagttcttcttaagacatccttgtcataaatatatagcaggaatatttttaccctccctattgaaaaggaggtttcacaaatgaatcaagatatatatacttacttacaccaacttcaacaagctcttcaaacacaacaagcagccatcctgaatttagaagatcaagtgcgccaactccaagaagagcttaacgaattaaaaaatcgcccctcctcttctgtaggaaaagtggaatacaaattcgatcaattaaaagtcgaaaatttaaatggtactttaaatattggtttaaacccattttcagcaaaaggacaacaaattgaagattttcaagtggatacagaaacattgaaggtaaaccctgaaactgaaacaaacccagacttttatcaaggtatcctccaagaaatgcatcgatacttagatgaagaagcatataatcgtattctccattttgaacaagaagagcgaacaccgcttgatgaaatgtatcgacaaatgatggtggatgacataaaaaaacagatggagcatcgactcccttattatttatcacaagtgcaatcatatgaaggtatttcaacagatccagattatttacgagatatcattattcaggcaatgaaacaagatattgacaaagcctttctctcctttattcagcacataccgggaaatttccgaaaggagtaagtatgtatgaaccttaacgttgtaaaccgtgagttaaaagtcggacagattaaaatgaacggtgtatcgtcgtccgcactctttttaattggagatgcaaatctcctcattctatcttctattctcgatacaccatttgaaacagttacagagggtccatttgtaccattagtaacagatgtccctcctactccaggttaaggagactgagaaattatgttgcatcatgtgtctattgtccaaaatgtttctattatttctttagggattgctgctgtatttcaagttggagatgcaaaccaaatggaattaaaaagtagagctattgccgtccaccgtgaaattcctttttatatacggggagaaggtcgctttgatgcttttgaaatctttacagatgaacacattacaattccaaaacgaacgacagatgtaaaattaaacattgtaaatgaatgcccttttattgaagttaataacgttgaattacgcacacttttaaattctggttgctttcaaattggaaatgttgattatggttttaataactctcgtattatacaaatccgccaatatattacggatgaaccttccgcacaataattcatatagtaattaaaaagcttagtaaagtaggtggatggtatgccttcggttgtaggaaatctcgtcgtgcaaaacagtaacggctctttcaacttaggagatttttataacgtatctccgaaagaaaacacgaaagcctataacggatctggagcttccaatgttgggtttgtcgtgaatacgtttaacggtgttagtgcaacgaatacatttgattctgatgtggcagatcaagatcagattggaacagcgtaaaaaaagtaggagatattctcctacttttttcttttatctaattcaaaattattaaaataaaattttaataagcaagagctttactgtccacaaatagtggtataaacaagtaagtagtgaagaggcactatttcattttatttaaatgataacccgctctcctccaaagccctcctaagcttcggcaaagacgcaggtcccataccatgcagttttaatatttctttttcactatattttgagagttcttctacagtttgaattccatggtgttctaatgcccttcttgctggcgctgaaagaagagagagaaaaccttcttttggttttctctctttctcacagactgggcaagttggacaatcgctacttttatagtactcgtgtccctgttcacaagttcttaacgttttttccgttaccattttcaagcccctctattcttcaatatttacaacgtgattcccatcaaagaagtataaacatttctcttttacaggatgttgtaagcttttctccagtgcttttgcatataacgaaagctgcactttatatcgatcttctaaaattggtttcgcttgttcaaatccgcctggaaatttcccttcaatcgtatctgttttgaagtcgattaacgtaatgccatcttcctcttcaatcatgcagtcgataaccccttggacaagaatcgattccccgctattcccttgccaatcttgatatgcttcttctgctgcaagcatcatcgtaaatggaacttcacgctcaacacttttcgccgctaatacccttttacctaagtcactgtcaaagaatgaaattactttttcaatcgctatttcttccgcctgctcgaatgttaataattccttatttaccattccagcaatttgctcttgaagaacttcaaccgtaatcggcttcttcaaatcaacatgctgcataacggcatggactgctgttccgcgctctgcgtacgttaacccttttttctccataaagcgcggacgtgttttaattggtgcacgtagttttttaataaaggcgttatcactaccatcttctgattgataatttctctttatttctgtaacagattgcttcgcacggtgagatgttgcttcctcatatccgtacttccacattaatctgtcgtacacttcatcttttcgttcactttctaacggcacagcctttttctcacgaagcgcttctaacaattcttgtttctcttcttgaactggctctggtgcaagtagcgtattaccgtccacaacttctactttccagctagtgtcatacccgtaaatttcatctggaatacttccttgtcctaattcaagaagcatttcactatcacggtgtctatataatgaaggggcaatccagtctaaataacaagacgccccggcacgtatgtgatctggtaataaccattcactatgttccctcgcatcaagccatttttccatttccttatttgcatccttaactgttccgattaaaattaacttctctttcgcgcgcgtcaacgctacgtatagtacgcgcatttcttccgcaattaattccattttcattttacgcttaatcgcaagctgtgataatgttgtatatttaattcgtttacgcggatcgataaattgcgaaccgaaaccgaaatctttatgcaataagaaacgtttcattaagtcttgtgtattaaaacgacgaccgagcccagctacaaatacaaccgggaactctaaccctttacttttatgaatcgtcataatgcgaacaacgtcttcttgttcaccgagggccctcgccgtacccatgtcatcaccgcgttctaaaatacgttcaataaaacgtaagaagcggaataatcctctaaatgatgttgcttcgtattgtcttgcgcggtcatatagtacgcgtaagtttgcctgcctttgctttccagctggtaaaccgccaacgaagtcgtaataacctgtctcaccgtacactttccaaattaaatcagaaagtgattgttgacgtgcaaattcacgccatccttgcagtaagttataaaaccactctaatttatcatgaagttcttgctcctcttcaagtggtgccccttttaagaatgagctcattacttcataaaacgagcctttctttccatgagcacgaagcgttgcaagttcttcatcgctcaatccaacgattggagaacgaagtacagctgcaagcggaatatcttgcatcggattatcaataacgcggaatacgttcatcataatatttacttccgtcgcttcaaagtaaccagtcgcaaggtcagcgtacactggaattccttgtaattttaactcttccataatttgcggggcccacggcatggagcgaagtaaaataacgaagtcgcggtattgtactgggcgcatactatcatttttacggtcatacacttcataacctgaatcaaccatcgctttaatgcgctgcgccataagacgagcttcaagctgtgctttttcgacttctgcaccttcttctccgtctattacttcttcttccgtttgctgaatgcacagtagttctgccgctacatcttcaccttctggataggtagcacctaactttaattcagcgtctgcatcgtagtcgatttctccgacttcttcacccataatttgtttgaagataaagttcgtacctgctaacacttcatgacgactacggaagtttttcgctaagtcgatcttcattccaccgcccaatccttcttgtgtgaagcgtttatattttcctaggaatagtcctggttcggctagtcggaaacgataaatcgactgctttacgtcaccaaccatgaacaagtttccttcactctcagaatctttcgttacgaatttaataatagattcctgtacaaagttcgtatcttgatattcatcgactaatacttcagcaaatttattacgatattggagcgccactgctgacggattcatttcaccattttcactttgttcacttaaaatttgtaaacagaaatgctctaaatctgtgaaatcgaccattcctttatctcgcttcatcgcttggaaacgctctgtaaatacttttacaagttgaacaagcttttctaatactgggtgcatatcttgaaaatctcgtaagaaactttcaggttttcggctaaataactcttcttgtaatttcttcacttcatctttcgctttattacgaagagagtctacttgttttacaacatcttcattgtaatcacttttcttaatacgctttaacgtttgccacgatacgttttgcatcgcttcatacaaacttgtccacgactcctgagcagctgatgatagcgttccaagtaaagctacatctgcttgcagggtttcaatgcgaggcgctggaccgtcaggaagcattgcgagttcagttgccttacgaatatgctgttccgctgtttcaagctggaatttcacatcttctaataaataagaagcatatactaaatcttcaattgtctttccttctacgtcatatgcttctactaatttatcaagccatttttccggatttggatgcgctcttgactctgtatgaagcgctaaaatcatacgttgtaagtcatcatcactacggtcactcgtataacgatcaacaagttcaaagaagattgtattatcttcgattccgtactcttcttctaatatgtcatctagcacttcttcttttaacaattcattttctgtttgattcgcaatacggaaacgaggatcaacatcaagcatgtagtaatatcctctaattacttgtaaacagaatgagtgaattgttgaaatggaagctttatttaataggctcagctgctttcttacgtgttgagagcctggttcatcaattaataccttttctaacgcttccccgattcggtttttcatctcttgcgccgctgcattcgtaaatgttacaacgagcaggcggtcgacatcgactggattctcttcattaataatctttttaataatacgttcaactaatactgctgttttccctgacccagctgcagccgcaactaaaatatcacgtccattcgctacaacagctttccactggtcatctgtccattgactaccttctggtttttcaggccaattttctatcattctccgccaacctcctctcttattttctccatcgcttcgctatctttcatatcttttaacgatcggaactgattatcttcaagtgactcatcaaattgacaaacagatttgaagttacagaacgtacatgctgctttatttcccattttataaggagcaatatcgataacaccttctgtaatatcttttccgatattttcaaacgtatggtgtacatatttttgcagtacgttaaactcttgctcacttgcaatacttgaacgcgcactaaagctaccgtcttttttcaggccagcagaaataatatctgaacttcctgttgaaagtttgttatccattaaacgaacaacgtcagcatctcctaatacgagtcctttcattttaaatttctttaaaatttctttttcaatttcagcttcagatgcgtcacctttcatctcaacgattgggttatgaatatggaaatacaatacaccagctggtgatgctgcgtgaccttttttcatccacgtctgcgcattcgaagtaacaacatctaaatacgttaacatttgaagtgctaatccgtaatacacttccgttaaatctaacgcttttgaacttgatttataatcaataatacgtaagaacgtcccgttttcatcttctgccttatcaacacggtcaatacggccgacaacttccatcttcacaccatttggtaatgagaattccatcggcggaagtgatcctgtaccacccataccgaacggcacttctaaatcaactggtacgaatccgcttgacttcgcatgttcacgaagaatgattgacgtacggaaaatgatttgttgtagtttttgttttaaatagaaatgacggtttgaacttaataaaatttgtcgttgtaataacggtgcgatttcttctattactaaaacagaaagatgctcacactcttttatggataaatccgcccaagtacggttttcacgcaatagcttgtccgcaattttctttaatgccgcatggaataattcgccgatgtccggcgcatcaagcttgaaaatatcacgctctctaagcgataaaccgtgctgcgcaaaatgagcgtatgcacaacggttaaatagttccatacgagagacgcttcctttaattatatctccgtataaatctctacttactgctgtacttagtttcttcgcacgatttcgatagaataaacttgataagacgcggctacttttttgtttccattcatctgaagttacgtagaaattatatacgtcccaccaaaagtctaaattcccttcaaatccgtatcgcttccacgtttgtagttgctgcataacgtaagataacgttacttctggcgttgctacgtatgaaatttgttctgaacgtgataaatcgtttacgtcattggtaataaatgaatctttcacattagggaacattctttttattttcttaataaagctagacgcaagtaacgtctttccttcttcatctgcaagcgggcatgaaatatataacttctcagatgctctcgttaccatttgatacataacgaactgttcttctaacaaagtttgtctcgtcgttggcgctaattcaatccctgctgcaccaagaacttctctttcttcatcagaaagcataccttcgtccataggtgctgctggaataacaccctcatttacacctataataaacgttgctttcacgtcagataacctggagtgatcaatattagcaattaacacttggtctaatgacggcggaatgttagcaaattgaagtgcctcaagacctgtcgacataacgtccgtaaacatagaaagagacattttctcttcaccaagcatctctacaaacgtatcaagaaggctcattacttcttcccatacttgttcatgatctgtcgcaaataagaaatctccactttcttctgcacgtatacgtaattcttctagttttttcggaacatccagctcttctagaaataagtaaactgcttcacacatttgcataactgttcctgcacgctttaaccttttttgcatgcgaataacaggtgttcttacaacgtcacgcaatcgatttattttctcttccatttcacgttcactatctgtgatcatcccgttcgtatcatcaagagaacgataacggcgatacatccatggatcctctgaagtccacctctttccttgtacaccgtacgctaaacagtaattttcaaattcatccatttcttcacgcatcgtttcttttcttacgtctaatggatataaaagctctgttttcacgcagcggaacaccgcatcataacgccaattcccactaataatctcgagtgcagaacgaatacattctactaatgggtggtgtgacatcgggcgcttttcatcgatgaagtgtgggatattataatctgtaaataacgttcgcatcacatcgtaataactttccccattacgaagaagaaccgcaatatctcggtaacgatagttttcctccgccacaagtttacgaatttcacgcgcaacaccttctacctctgctcgtaaattcgcagctgtactaatcgttacactcgcttcaccgttaaatttttcattcggacgcgcttcataatgagcttctaaatgcgctaatgccggagaatgaaaacgcggctgttccataagtggaattgttttttcaatttctattttctcttcacgcgctacttgtttgattttttcatacgttaacgtcgtttcataaaataaatcgagttcatttactggctgtgctaacgttttttcatctatcgttaacgtgatcgtaactctcgctccgcaaatcataagctgtcttacaatctctaactcttgcggggaaaatgaatgaaatccatctatataaatttccgcaccatttacatattcagactgcggaagcttttccactagcaattgtaggtagtcttctgaatctaaatattttccaattaaagcacgttcaaaatcatcgtataatagctgtaaatcatacactttattcgctagtaacttttgttcggcactgctactatgcgcatccaattgttgccacatttcatatacgttagatggcgttacattgtaacgtttaaactctgcaatcatactgccaagatgttcaaagaaaccgttttgctccgctgctttttggaacaccgataatccatctttacgagactctacaattttacggagtaacatatgtacacccgcttcatcaatatgaagacgactcgctccgccaacttcttgtagtaccttccacgctaatcgtgaaaaactaaaaacttgtgcccgaatagaacctcttacatcctcacttccaattaacgcctgctgcgtctggaatgtcatctgttctggcacaagatataatattgttttccctctcgggcgttgttttaactcttcttgcacttcgcgtaaacaaagtgtactttttccacttcccgctctaccaatcacaaatcgaagtgacatgtaaccccacctttcacttacataacgaacgttagtttgctactataattgtattatagtacacgaaaaaagacaaactgagttgtttgtcttttctatacttctacttcattatatcaaccttttgaaaaattcgtttgcacctcttgaattggccaatatcgcaaatcaactttaccgacaactgtatcagcttttacaaagccaaagtgtctactatcccagctcccgagccggttatcacctactacaaaaataaacccgggtggcaccagcttttctttcgttaactcttctaatgtaaagtcgcctgttagttgccttccatttatctctttcttatacttctctaaatacggctcatcaataaattgaccgtttatatataacttatcctgcttatattcaatatgatctccaggtaaaccgataacccgctttacatagtcctcttttttattcgcatgaaataccacaacgtcaaatctgttcaagtccccaacttgataactcaccttatttacaactagcatattgccatcttgcaatgtcggcatcattgacttcccctctacaacatacgttgaaaagaaaaacgttcgaaaaaatacagctaataatacaccaattaaaattgttcgtatccactctatgccttcttttttcaaagttttcttcatctgcttctccccttatcctttaatactgaagctttcctttacaaagaagactattcttaatgtagttctaactttacttcgattttcttaccgacataccataaaataaaaataccaatcgctacaataactgatttcactggattatgaataaatgacattaaatcatgaccgatatacgttaaaataaaaatcatcacaagttttccgaatgctaacgctagaccaaactgttttacactaattcgggataaaccagcgacaacatttatgagcgctgacggtgtaaacggaaaacaaaatataacaaaaatcggtgcgaatcctttcctttcaacccaccccattgcttttcgtactctctcatgcttatttacaaacgaaaagaaacgactgcgaccaaaatggcggatgatgaaaaagacaagtaatgcacccattactgatccaagccatgaataaagaaaaccgagccaaaagccaaatgcaacagcattcgccagtacaaatacaataagcggtaatgctggaatcaacgcctctatcatcggtaaaccaataccaagaagtggtccgaacgctttataactctcaacaatatgatccatattttctggtgaaaaatactctttgattgtctgaaaatccattctacactttacccctttactctaaatactatccctactgtatcattgcttatatgaaagaggaaatggtagatacgacatacggagatgtatttattaaagtttccatatctttcataagaattccttcattatttagctatgataatctatcaatattcgacaggacgtgtcgttcattttgttatttagattgtttttcggtttttatcggtaaatgaaattatactggtgattttctaaatatatcaattacaactcgttttttctaatatatcgccttatctacaaagactgactgacaaacaaaaaagaatggggattcccccatcctttcacacttcgccttccttcacaaaatacaccttctcataagcgggtcttaatgttgattcctcttttttatcgacctctttaaaacaaggattcccttgttttttcctacgatcttcatattcagtacgtaatttcgctgtacgattttgttgattttcaaaactagtttttgatatttctaatttcacagcaaagccatttataaatctaataataagatttccatcttctaattctttattactttcaatataaaaatgagacaaccaagcgcactcttttctagagtaagaataggtagggaaaaaataaagttgatctgctggactaatcgcaatcggtgctttatgtgtaatatgagttaactctttcgttccttcttttctgcctaagaaactagagccatgcttgcggcaacttctttctataatatctagaggtttttgaaatacgaaaaaagaatcattcatttcaacgactcgcgtaacaattttcttttcacttagaataacaggaagtaaggccatcgtatttttcgttacaacataattttcgacatagcgttccactttactttccatactccattatctccttttttccatttatattagcagctgcatatataattttagcatctatgaaaaggaaatagcttacaagttccgcttttttacaattttttatcatttatcaaacatttgttaaacaataaaatcacaatatagaaattaattaattttaaagttataaaaacagcatttatactacctataaatatttattatccattcctcatttcacatcattacaacaactaactttgctataattaaaatgtaaatccaatatatggagggccactatggaagaaaaagagattcaaccatcgattcaaatgaaaaatagtagcgtcattatcgtgaaaaactcagctagtattatattcggtttatttttcattctgctattctttgccaaaccgtttcgtaaatcaaaatgtccagaatgtaaaaaacgtgagaagaaaaaatcagggcaagaacaataaaaggccttcctttatggaatgcctttttacatttgtagtatcattttatttattcttcttccccctaaaaaacgactatattttcttccaaggttctctacatcttttttgatttgtaatataatccttatataaaacatgagaaagagtatttgtacttgttacccgcttttaatttttattaaaaaattaaaatttgtacatctttatccatcactaacaattcgttaattagttaactttgcaatataagttttgtatataatgtcattcaaaaacaaaatatatataagtagctatttataattacattgctttttatcgaattctaaaaaggagttgtatactatggataaagaaaatccattaaatcagcaggttaatagcattccctcagatgctctgaatacccctagtaaggaacaagaacaactgttagaaacatcatctcaaaacgtacaaaattccaacaacaacgctaacaaaaaagatgttactcaaggtctatctggaaaagatttctccatttcaacagagaatacaaatttatagttatttactatcatacgcagcaaatgctcttgctgaactaattcttctacagaaactaatacgcattccagataattttttaccagttgtaacatcgaaaaagagatttagatataaaaacaggctctaaaaaaactttctccacaacaaaaaaaggatggcattagccatccttttttccatcatcaactataaaattatagtttgattacgtttttagcttgaggtccacggttaccgtcttcgatttcgaagctaactttttgaccttcttctaaagatttgaaaccgtcagtttcgattgctgagaagtgtacgaatacgtcgttttcgcctggaacttcgatgaaaccgaaacctttttcgttgttaaaccattttacttgtcctgttactgccataattatttcctcctaagaaaatacaaattttaaattttttagtcttcctgtctaaaaaaagaatccacacattatcaaatacgaaacataaactagttctcacatactttttctcgttcgttttcagcacttgataacatatggattgcttaatttaactattcaactgacatcatcatagcacattaaaataaaatgtacaatctttttcgaaaatagaatttctaatttttagtatttcttataaaatataattatctctattctaaataaggaggagtttatgaccaataaaattcctagaaaaacattaaaaagaattgaagaggatattgaaaataataatcttggaaaagcaagagatagattgcatggcctcatctttacatacccaaatgaattacatcttcgaaaacaactcggagatatttattataaattacaatatccagaaatggctggacgttactggtatctagaagagcataaaacaggtattatgcatgaatcatgtttattatttgaaaaatcaatgggaaatagtcctcatcatattgcacgtgctttaaagtttaaaggcgattctaaccatataaaagggttgtataaagatcaacctttatcttcagtgcagaagaaagtagcagaggagttaatttatgagtataaagaaacatggaaagataagctagttccttttggctgtctagcattgcttgcttccctcctcttttctgccgttgttggtctattcactatttggaattggattttttaatcacagggggaattttcacatgtcaaactacgctaaagaagaaaggctaacagggggaaacgtctcaagcgtatatcgttctgaaaatactgttcggcgagagttaaagccaggcagtgaaaagattcataagctattgcaatatttagaaaacaaaggatttcattatgctccaaagtttttaggtgtagatgaaaaggatagagagattttatcctttattgaaggagaagctggcaattatcctttaaaagaatatatgcgatctaatgatgtattaaaagaaatagcaaagatgctccgcctttaccatgatgctgtaagtgattttccgttattagctgattggaaaccgatggatcatactccaaataacattgaggttttatgtcacaatgattttaccatatataacattatttttaataataagaagccagtagggattattgatttcgatgttgctgctcctggtccaagactatgggatatcgcttatacactctatacttgtgtgcctttaagtagagtgtattatactgaatccggtgaagccgttcattatgactcatcgcaacatgcagatcgtattaaagagagagtgaatttgttcgttcagtcctatgataaaaatatggatgaagattacttaggaatggtgttgcttcgattagaagggttatgtacatatatgaaacgaaaagctcaagaaggcgacttgaatttccaaagaatgatcgatgaaggacatctagagcattatgagaaagatatgaagtttattcgtgatcatagggctgagtggagttgatttagtaataaagaaaagttagtatcgttttttgccgacaactcaatctctcttttcgaatcgtttagaaaataacaaggggcacctttcaaaaaggtgccccttccttttatttcataaactgtgcttcttccgtagatccttttaacgctgtcgttgatgaagttccgcctgtaatcacttgtgccacttcatcaaagtaacctgttcctacttcgcgttgatgacgtgttgcagagtagccatgtttttcagctgcgaattctgcttgttgtagttcagagtatgctgccatgccgcgctctttatagccacgtgctagttcaaacataccgtaatttaatgaatggaatccagcaagtgttacgaattggaacttgtaaccgtaagatgcgatttccttttggaagcttgcaattgttttttcatctagtttttgtttccagttaaatgaaggtgagcagttatatgcaagtagcttccctggatgctccttatgaattgcgtccgcaaatcgttttgcatcttctaaattcggttctgacgtttcacaccaaacgaggtctgcgtacggtgcatacgctaaaccgcgcgcaattgcttgatcaagacctgcatttgtacggtaaaatccttctggtgttctttctcctgtaataaatgctttatcaacaggatcaatatcgctcgtaattaaatcagctgcatccgcatctgttcttgcaacgataattgtcggcactcccattacatctgctgcaaggcgtgcagaaattaaattgcgtactgctgtttgcgttggtagtaatacttttccgcctaaatggccacattttttctctgaagataattgatcttcaaaatgcacacctgatgcacctgcttcaatcatacctttcatcagttcgaatacatttaattgcccaccaaatccagcttctgcatctgctacaatcggtacgaaatagtctgtatcatcgcttccttccatatgctgaatttgatccgcacgttgaagcgtttgattaattcgttttactacagcaggtacgctgttcgctggatataaactttggtctggatacatatgcccagaaaggtttgcatcagctgctacttgccaaccacttaagtaaatcgcttttaacccagcttttacttgttgcatcgcttggtttcctgttaatgcgccaagtgcgttaatatagtcttctgtatgaagcgatgtccaaagcttctcagcaccacgacgcgctaacgtatgttcaatatcaattgacccgcgcaggcgaattacatcttctgccgaatatggacgtgtgatccctttccaacgctcatctaattcccagctttcttgtaacttctcgattctttcgtttttcatttgttccatccccttttcattttttataaaatttcataacccggtaatgttaaaaatggtacgaattcatcatttcgaacgagatttgtaaacaacgttgtcgcctcttggaatctccctttcttaaaggcttccttaccaatctctctttctatttttgctaattcttcttcttttaattcttccattaattcaagcgtaatattacgaccatcatttagttttccaccttcatgacgaatccattgccatacttgtgctcttgaaatttcagctgttgccgcatcttccattaagttataaatgggtgctgctccccgtccgcttaaccaagatgcaatatattgaatacctacgctaatattcatgcgaaggccctcttctgtaatcgttcccaccggtacctctagtaaatcgttttctgttacacatatttcttcacgtcttctaaaaatttgatttggtgttttcataatgtgattaaacacttccattgcaaccggtacaagtccagggtgggcaacccaagtcccgtcatgaccgtctaaagcttcgcgttccttatcagcacgcactttttcaaaagctgcttcatttgcttctggattatttttaatcggaatttgtgccgccattcctccaattgctggtgcattacggcggtgacatgtttgaattactttcaaagaatacgaacgcataaatggcgccgtcatcgtgacttgtgctctatctggtagtaagaatttattatgattacggaaactctttaaaaagctaaaaatataatcccatcttccgcagtttaagccagcagaatgatcttttagctcatacaaaatttcatccatttcaaacgaagcgtgaatcgtttccagtaacacagttgctttaatcgttccatttggaatgccgatatatttttgagcaaatacgaatacatcattccataatctcgcttctaaataactttccattttcggtaagtaaaagtatgggccgctcccttttgctaaaagagctttcgcattatggaaaaagtacaagccgaagtctactaagctacccgacatatttttcccatcaacttgcatatgcttttcctctaaatgccatcctcttggacgtacaatgagtacagctgttttctcatttaatctatattctttccctttatcattttcatgtgaaatcgttccctttactgcatctcgtaaattgatttggccttccactgcattttcccaagttggtgaattcgaatcttcaaaatccgccataaaaagatgcgctcctgaatttaaagcgttaatgaccatctttctatctaccggtccagtaatctctacacggcgatcctctaagtcttttggcagcttggcaattgtccaatccgcttcacgtatgtgttttgtttcttctagaaacttcggaaactcccctgcatcaattctcttttgtttttctacacgtttttgtaaaagttctatgcggcgctcattaaaattctcatgtagttccttcaaaaaactaagcacctcaggtgtcaatatttcgctgtacgctggtaacatttctccaacgagtgtaacccgtgaagtttgcgtcgacatattagcatccccttcttaaactgttttataacagatttgatttcatgttttatattatataacaaatcttcagaaaaggaagttttttttgaaaattcatttcgtttttttcaaaacgccattctttcgcgctttatttcatacaaaaaaggccgctgttatacaacaacgacctttttgtattatttttgaatttcactttgactagttaaactttattactgcccttgttccatatcatgcaatattgctctatgtaaaaactgtgcgtattgttctctcgttaccttcatagacggaccgaatttaccttctccgattcccattgtaataccatttgtttgtactgcactaattgcattcgttgcccatgaatttgctgaaacatcattaaagttatgagatcgctttgcctgtaggtcaaaagcattcgtaagaacttgtgccatttccgcacgcgttaacgtcgccttcggtctaaagtttccattctcgtctccctggaaaattccgatttccgttagagccaatatctcctcgataaagcttgttgaattttcatcgatatctccatatgggttttcatattcatcttgttcttccatatcaaacacacggtaaattaaagctgcaacttgctcacgtgttacattatccccaaaaccgaatattccatcgccatatcccaaaattatttcttgttccgctaattcatgaattgcctcatatgcccaatgtccttttggtacatctttaaatacaattgtatttgctttttgcaacggtgcactttccgcttttacactattactctctgctgagaataacaccccacccataattgttaatgctgtagctgtttttaataattttttgctcatcaaattatctccccaatatgtatatgtttttttaaaaatatacagaataaatggtatagtgacaatatattttccgacacatttcgtgacggttttgtgaatcatattacacatcatgtctttttcatcgggttgattataaagcttgtttataatcataaaaatacataaatacgaataataattcttttttaaacaaacaaaaaagcacaaatttttctatttgtgctttcatatttcactctacttccaatcctctttcaaatgataattaataatcgcattattaataaactgagcatattgttctctaggtacagggcgatttaattcatacatgccattcccagttcctctcacaacattattagattgtaacgcactaattgcatcttctgcccagtgaccttttggaatatctttaaatgtatgtttttgtttcgtttcaaaattaaatgctcgttttaaaatgacagccatttccgctctagagattggtgctttcggcctaaaatccccttggccatcccctgtaaaaacaccacgttttgttaacgctaaaatttcctttttaaaagtggttgtactatcagaaacatctttatatggattcgctactggcccttcttcttttatctcaagtgttctgtaaatagtcccagctacttgctcacgtgttataagatcgccaacaccatacttcccgtttccataccctaatataattttatgatacgctaaatccataatagcatcatatgcccaaaatccgtatggaacatcttcaaacacaatcatttgtggatactcttccgcttttacaggtgtcacattcgcccctgcaaatatacctcctgccattgtcgcaatcatcattacacccaatatttttttcttcattatcctctctccctatttcattcaaataaaatgaacttcattgtttcaggagtactattttttttgtgaatgtaagataaaatgcaaatcttctagaagaaatattcccactacctttctgctttatacccccttctttctttttcaaaaaggaagttgtcacatctaaggtgttatatactaaaacattctacaatctctttataaactccttttcactttataacttccctttattggcacctaaaggagatgcctaatggagattactatattcatggtttatatttcagaggtagcatcccccttcactgataactcgctttcgctgaattttgaggtgggggtcttactgcccagcaaataacgggataaaaaaatcatccttttttcttaaaagaggatgatttttttatatttattaacactcaaatatgctactacttttgaagagtaaattgggcaactatttgttttaattttcctgctgcgttatgcatatgttcaattgaaaccgaaatctcttgaacagatttttcttgctgttgaatagactcttttaccctatcagttcggtcagatgatctttgggaaatttgagccatgtcttctgcagaagccgagatttcctcactactcgctgcaatttcatctgtagacatagataccgtttgaatttgctcagatacttgctgtactttttctgtaattgttccaaatactttttctgtatgcattactacttgtgtacctgcctgtacctcattatctactttccccatcatatgtaccgtatggttcgttgttcccataacttgagtaataagattctcaatttgttttgcagaatcactagattgttctgctaatttccgcacttcatctgccacaattgcaaatcctctaccactttcaccagcacgtgcagcctcaattgcggcgtttaatgctaataagttaatctgggaggtaataccttgcataacatcaatgattttaacaatttcttctgattgttctttcatagtctctacttgtttcacaccgctatgtaccgaattttggattgtatccatctgttgaatcatttgtttcattaatttgttaccactctctgcatctaatgctgattgagcagataattcatttacagaggatgatgtattgactatactctgcattccttgcgtcaactcttccatcgcacccgcagtttgttccattgcttgcatttgactctctgcaccatttgcaacttcttcaatatccatagtgattttcttcgctgcactactagatacttctgatgcagatactactccgtctgcatgttggaataaaagctgaatattattctctacttcttgcatatttgttcttagccctgcaatcatctcgttaaaattacttactaatatacctaattcatccttagcagtatactcaccatgtacggttaaatctccttctttcgctctttccatcatacgactaaccgtttgtaaaggagcaactatgagcttgctaataatataacttactatacatataacgattgtagtaactactacaagaatgataaaggtaataacggaacgatcaatcattttttgagaatctttaaatacttggtcagctaaatttgaaacatacgattctagatccactgcataaccagctaactctattcccttcggttttaattccttctgaaattcatttaccatttgtggctcatttgttgccttcgccttttcaaataattttttatatgtatctttataacttggcaaagatttcttcatcttctgaaatagttcatcctcttgcttacttaaattaaaaccatcatcatattcttttaataaagaatcatattttttaagatccttttcaatattatcaattatcccctctttatttgccacttcattttgtgatgccgtaattaattctagtaagttatattctaatgaattttgtgtacgaagcattccttctaataaaattgcagaatattgataatcatctactacaacctctgtatcgtgcttaatcttattaatagaattaattgctacactgctcataattaccatacctaaaactgctaatgaaataagcgctaataatttatatttcacttttaaattttgtaaaaaatacatttttccacctttattcctttatatatagatttttagaattttatagcttattatttacaaaatcgtaataaaaagcaatgataaatattcccaatatgaaacttatatctctataaaaaaagaagtagctatcatgctactcctttttgctttgtttctcatattgttcaaacgtatgaattctttcaaaaattggtgggtgcgtgtataagaaaaattttactaacgcaggcggatttacttggcttaaacttgtttttgataaatattgaaaagttttcacaccagatttcccatccttcgtcatatttaaagcatattgatctgccgctctttcttctatacgtgaaacgtagtttgttgctggttgtgctgcaaaagagaggacagaagaaattaagaaaaataaaggtaaaatggagaaacatgctacttttgaaatttgcaatgtatctccccatttgcgaatacacatatttataatacgactaattaaaaacatacctataaacgatagcaatacataacttgcaacgccaaaatatatatgtttcataacataatgccccatttcatgggccattataaataaaatctctttatcttttaactgcttaagtgttgtatcccacattacaatacgggcgttagggccaattcctgttacgtaagcatttaatgcattcgttttttctgacatatttacttcatatacgtgtttagcaggaatgtccgctttgtctgctatcgctaaaattttcgtttctaattctttatttttcagcgtcgagaagtcgttatacagtggatcaataacgacaggctgtatgaatgttaaaaagattgtaaatggaacagagagcgcccatcctgcgagccaccatctcttcggaaatttacggataagccataatagaacggtaactacgattaacatagtcgcataactttcccaaaaaccgataacatgatcttttatccagctttgtgtactttgtgttgaaatgccgtaatcaacggacactttccggccaatccattgcatcggtaaggcaagcactgttgtcaataatgataaataaaagaaataaatcgcaacttgcaaaacacttattttagtcgtttccttcgaccatttctcaaactttcttgaaatacctagcacaagtacaaataataaaataatccattcaagaggcgtcgctaaaaagtatagtaaatttttcacgcgcgaataatcttggcttagcgtaagctctctcgtactcataaacgtttctggatctgcactcgttcccttatacatgtccggaataagttcatgattccatccaaataaataccaatatataagtaacgcaaatccaacgtacaaaaaaagcgaccaaccgataaccttcttcacgctattccctcctctatgctgcctgtctattattattgtaagttcgtacacgctaaattagaacaagcttattatgtgaattgctctggatctttttatttacataaaaaaactcttctacataagaagagttttacctatctttaaacactttcttcggttcacaatccgtacacttacaaaccaacacgtaccctacttgctttttagataaaataaaaagcctctttaaggaagtacatctattaataaactaaaatcttgtaaagagaaagaactatatttcataataccctgtacagctaaaagtaaaaccagaccgatcacacacatatagttaacgctttcttcattctttttttcagtaaccactccaccacttatacataaaatccctagcaaatggagcgctaaatacatgaaaaaataagcttcctcccagcgcaaaataacattcactgtcgttattaacactagactaagtaaaatcaaataaaaaaacttatttgatgatatcgtttcattcatataattttatacatccctttcaaatttcgaattaatgatgtttcaaagctataaagtaaatgattgtttttataccataaaacaaaaggaaagccaccattactttctcgaatactttatgaatccacatatacttctcttcattctttttgaagatgcgcttcatcatttcttctacaattagaccaaatgttagtaaaaccccgaacacaataagaagagaaataatattttcttttaaatgagtactagaaaatacgtaatactctggaaacacaatcgtatctactacaggttgaagccaatgacaaacacttctatcacacatatctgtaatagacgtagaatctataatgtcttttaatattttttcaaccgtcttcttcatcttatttactcccgactacatctgaaaagctcttttcctgctctgcatatataaccggcacttctttactccaatatttgcgattaacaaataaaaagataagtactaagtttaatcctgttataaaaataataagtccaggaaagaatgtcgtataatttgagaaatcggcaaaactaataattttttctctacttattagaaaagacgcacctattacaaatgcattgtttaacatatgtattgcaattggcatgagtaaacttttcgtacgaatatatacgattgacaatacgatgctgaatatggctgcaccgaggaaatcaacatgtaacaacgcaaacaatattgctacaacgatggtcgctatgctcgttccccattttgttgcaaaacgttgaagtaaaaatccgcgaaaaacaatttccccgataattggtgcgatgaatacgaccctaatgacttgagatacatatcccccagtactatctacaattggttcatgcagggcgttcataataaagtccggtgtaatccatgcaaaactatacatatacaaaataagatacccgtaactaaacatgcataacataaccgtaatgtataaaacttgtaccaagttaaatgtttcatttttattaacaaataatgaaaatgaaatgtggtgctttctatactcataagaaatccataccatcggaaggatatagaatataaggatatttataaaagaagaattttgtatatgaaatatacttgttagcaaatcgccactacttctcgctattaaaattaatagtgcaaatacaattaaaaaatatctagctcgcatcacttgaaacgggttcacactcatctcctcccctatgttacttttatcatatcatttgattcttaattttttgcgaaagaaaaccttaaaatttccttaaaaattccataagttacaaaatgatgatatgatattcgagaaaattaggagggatatttatgtaccaagcaaatattttactcgttgatgatgaaacagcaattttacaattactaactaccattcttgaaaaagaaggcttttctcatattacaactgcaacatcagctgaaatagctttatctctaactaagcaaaacaattacgatttaattattttagatgtaatgcttcctggacaatctggttttgatatttgtccaatcattcgccaacaaacagattgtccaattttcttcctatcagcaaaagcatctgatttagataaaatatccggattttcatacggtgcagatgattatattacgaaaccatttaatccattagaagtagtagcacgtatgaaagcacagcttcggagacatatgaaacaaaccgtaccacacgaacaaaaaccacactcaatttcatttggaagatttgaaattgatcagcactctgcagaactaacagtagatgggcacattgtcgaatgttctgctcaactctttcaactactactcttcttttgcgagaatccgaactacgtattttcgaaagaggaaatatatgaaaaagtttggggagcacctgcctataatggcgatgacaacactgttatggtccacattcgaaaactacgtgaaaaaattgaacacgatccaagtaaaccagaatatataaaaaccgttcgcgggcttggttataagttcgttacaaagtagggtgacgatatgaattttaataaacgacttattattcaatttatcatgcaacacgtttttgttttagttacattacttatcgctgtagttgctgcttttacttatttaatttttcttcttactagtactttatacgaacctaacattccggattctgatagttttacaatttcaagatacatctcttcagaagatgggcatatttcgttacaatctgaagtgcaagatttaataaaggagaaaaatgattggctccaagttgtagatgaaaacggaaaaatcctctaccactttaatacaccaaatgatgttccggatgcttatacgaagacatctttagtcgcatatatacagcatcatatcgaaagcaattataaatttacatattgggaaattgaattagaagaaaagaaagcacttgttatttatggtggtatgttaaaaagcaatgcgttactgacagcaattcaaaaggatcactcctctttaacgatggattcgttcacattaacagatcaagaaaaacagttactgtctaaagaaaaagcagcacttcaaatatttaatcaaaatggcgaagaggttttttcctatccaactggaaagaaaaaaacattttcagcaatacaaatcgcccttaatgaaaaagagccgtggaatcataaagaaaatacgtctagcttttacgatgcaaatagtggcaaccttctcgttgtgactgcgaaaaatgatcactactatccagatgacgaaattgaagatgtatttactaagaagtttctcatcggatgcggattaatccttcttatcgtatttgtttatttagtcattctttctatttggtacggtaataaattcgggaaaccgttattacatgcgatgcgctggcttaaaaatatcgctggcggaaagtatgaagaacctattagtaaaaaaggaaaacctgtcaggttccggcgatctggtaaagaaaaatggtcattccgtttgtttagagatgtaacaagttcactagaacacctttctattacactcaaaaaaaatgatgcgatgaggcaagtcctccagcaaacacgagaagaatggattaccggtctaacacacgacttaaaaacaccacttagctctattatatggctacgcattattactcgaatcggatcaatataactggactgatcgtgatattcagcaatttggtagtgttatgaaagagaaatctcaatatatgacgacattaattgatgatttaagcttaacgtatcaattaaaaaataacagccttcctgcccaacacgtaaacattgaaatcaatcagttcgttcaaaaagtattattgcagtttattaacaatccaacactacaaaatcaaaatattgaattcgtaccgagctcaaataaaattcaatatttcattgaagaaaaatggtttcagcgtattatcgaaaacttactcgtaaacgcggtaaaacataataatgaaacgactaatgtcatcgtaaaactatcacaaaacgctaattcctttacactctccatttcagatgacggaaaaggaatggatgaaaaaacgaaagaacttctatttgaacgatattaccgcggaacaaacacagaagaaagcaacatcggaactggacttggcctagccattacaaaacagctcgttcatgctcataacggaacaatttccgttgatagtgcactcggaaaaggaacgacgattatccttgtatttccgtttcgttcgtaagaaagatgctatgtggcgtctttttttcttttctgggagagttttgcggtaattgaaattatgcagatcgttttttttgaggtgttttagcggtatatgaaattatatcggcgattttttgaatatatcggcgcaactcgaattatatcagcgattttttgaatatatcagcgcaactcgaattatatcggcgattttctagatatatcgacttaccgacaaaaaccgacaatactaacctacttccctactatacaaagtaaaaataacccttcataactcactatgaaaggtcactccatatttcagctatttccctactaacacaaacacattctcatcaggtgcttccattactgcaacatgtcctgattctgttggaaatggttcgcgaatccactttacatctttattatcttttaaactctcatacgtttgttgtacatcttctactaatacttcgacttccgtaaaattaatatccggatgattgcttattactaactccgaacttttctcatctggaaatttcaatcctattaacgtccaaatagctccttcttctagttctctttctatcatccagttttgcttcattcccatttctttatagaaagaaactgatctttctatatctttcgtatgtatagatacacattctagttttttgaacattttcccatttctccttttatgaaaaagcgaaccatctcccaatgattcgctcttaccttattattttttcttcaccggtatccaaagctctacttgtgcaaactcactcttatcttcgtggcaacgctcatcgtacagttcaaactctgtaactccgcaatgttcataccctgaatgcggaaaccattctgagaatactgcattccaagtttggtgaatagacgataccatttctttatgaggaactttcggcgttgtaaatactgcatatgttgctgcagggaaagtacgctttgcaatttcatttggtacattttcaaagtctgtaacttccattccaataatataagtgaagtcccctgtttctaaattaaaatcagtacataatccaagctctacccattggctcgtatctttacgattcggaatcgttgttccaagatctttttgtaaatattcttgccaaaatgctgggatgtcttgatggttcttcccctctttacttgtcgtcttcagttcataacctgccattaaaaattctggtttatttacaatacgatattccatttgtatgcctcctaaatacggatttaattttctttgctttacattcactctgtaatacatcggtgtttcgatttcttgttttcgatattcactcggtgtcatttgaaataattttttaaaggctctcgtgaacgtttcgtgagattgaaagccatgctcaaatgcgatatcaataactttttcatccgtatgagaaagttgataagctgcccgggctaacctcctctttcgaacatactccattactgtatcacctactaacgcctgaaatacacgatgaaaatgcgactcagaaaaacctgcaacccgcgctaaattacgcagcgtttgtttttccattacatcttcctcaatataatcaattgacctttgaatttgtgtttcatagctttccatctctgttcacccgccttatatgtattatgataaaagagaatcctatccaattcttgacgttttttactataattccataaaaaattgtaacttttttatatgtatttcgttgttatgtatgaagggagggaaatgtagtgaaacgcaaacaatcattagaagacatttactccgagcatatgcaagatttatttcgctatcttctctccctaaccggagattcccactatgcagaagatctcatgcaagaaaccttttaccgaatgctcgtccatattgactattataaaggagaagaaattaggccgtggttatttacaattgcctacaatgcctttatcgattggtatcgtaaagaaaagaaatataaaacaacagaagttgcagaattccatttaccaaacgttccaagtacagaacatgaatatttcgtaaaacatgagattgctagttggttagacagtttatcttctcttccgctcgaaagacgaaatgccctgctactacgagattactatggattctcctataaggaaatagcagaaatgactggtctctcattagcgaaagtgaaaattgaattacacaggggacgaaaagaaataaaaaccataaaggagtgatacagatgggctgtgcagaatttaaaaaactatggaagaagtatgaaaatggaacgctcacgcatgatgaacaagaactgttagaaagtcatattgagtcatgtgaagcttgtgaagcttacttagatgagctgttaacaaaaacagaaccaattaagaaaaagttacctccaaaagatcttaaaattcctttttggagaattaagtggaaacatcgtttacaaacgtttggttttatattatcaatttgcatcgttatctatataatcggcggggtattatcagccttttattttcaagctaataatgataaaaggctaaaagaaattagagaggttccttctctggcacttgaagcaactattccaaatagccgcgttatgggaggcggaacaagtgtagaagcttttttccgtacgaatagccaatttgatttagtaagaaccatcggtaaaaaagaaatgcccctcggtacaatagaaacaaaaagcttcttatcatctgtagatatcacgaagcaaacttggatgaatccgttctatcaaccaaaactcttctttgttcatcccaaaacagagcagggtgattatttaaaggattcatcaaaaaaagtatgggatacacttgcaaaagtacatgatggaaccgttgcagaagtagcaatttcttttgataaagcttacactttaaaagaattagaaccgcttttatatagcatattcgaggcacaaaaactccctccaactcctgtatggtacgctttagatacaggacaagaaagaaaaaatgtagatgactatatcctacatggcggagaagctataggatttccagaatatgtaagattcctcgataatgaaactgacgggcagaaaacgcaagaagacaaagtaaccgaaatgatgcgcgtcctttctatccataaaaaaacagtaagcaaaatagcagcgctttctgagaaagaactaaacttagataaacgttatcaatatgtaaaggataacggtgtaaaagtatacggaattgttattactggcccatcgaaagagttattaaaattacaaaactccccgcacgtacgttatgcgactcttggagatattgagatttggaattggtttgattattaataaaaaagaagtagcgctctaaaaacgatgcactacttcttttttaattcgaaatcactttcacatacatccctctcaccgctttttcataagcaatatcactcatctgtcttatgttttctgacacaacagacgactgaacgattttcccttcacgaagtaacggcggatcaataagacgcactttatttttctgatgtaaatcataatcgtttctatcttcttttacctttacatttcgatgaactttgcttaataaagcttctacttcggggtcattacattgctgcaatttcgaaataagctcctcatcttcaagaagaaaatcatctgcatgaataatccttttatgaagagctacctttaacgttttcgctaacatatcatttccgtaaatattcattggttccataaagaaatcgattacttccttgtaatacgtttctgtaaaccattctgccatttcgacactttgaacaaccattttcccatctacagcgatgacatcttctaaaaaactgtgaacttcttctaaagaaacatacccatatgtatacatatctcgtaatgtataatccactctgtctgcgcataattctggtgctgacctttcgagtaacgtccatttcgaatcatctaacaaaatatcttcatagttataaccatacttcgcaagaatcgctggaatttctgagtttttcacaacagaactaaatatctcttcatgataactttcatcttcattatgaaaaacgtaatcaatcacgtgggaaaaagcagtatgcgatacgtcatgcagtaaactagcgatctgttcttctactgaaccacctagttttttcactaacaacataacaccaactgaatgatcaaagcgcgttacattccatttctcgttcattaagtaacttgcgcctgcttgatgaattccctttagtctttgcatagatttacttgaaattaattcttctactacttgatccacttcaaattctccgtatagtacatctaatatgatcacttacaatccccctttattttgatcgagtcttataatcttatctcttttatgaaattagcaccaacataaatatttattgttatttgtttttattaaaaaaaatagagagccatcagctctctatttcataacccctattcaaatgtaacttctacctgcacaatctccgacctactaccaagtctaagcggtggtccccaaaacccaaatccagaagaaacaattgcgtggaacgcgcctttttgtgcgtatccccagtctagctcgtacattcttctcgttacaatatgattgggcgccatttgtccgcggtgcgtatgaccggataataataaatctacacctgccgctgctgcttgtttcaactcaaatggctggtgatccattgcgataacaggcatcgatttatctaccgtactcattaattgttcaaagctttgacgatctcgctctgttttatctcttcttccaacgagataaaagtcatcttcaattgtaattacttcatctaaaagaatacgaatatcaatcttatccatctcttgtaaaaactctggaaccgctctaccgtagtattcatggttccctaaaacaccatatacgcctaatggtgctttcatttgtttcatgattggtcccatattcttttgaatgaacacacctggatgatcatcgataatatcacctggcagtaaaataatatcaggttccatctcatttacatgacgaacaagtctttttaaatgcgaaacgccagacagtttaccgaaatgcatatcagaagccatcgcaatgcgtaaacttttacgcccctctacctttttcggtatgtgcacctcgtactttcttactaccggactatacgcattaaatactccatacgcaaagataaagataaatgcagctatcacagccgcccctgtccaaataattgccgcttctttctctactgaaaactgtaaaagaaagaccataatattagctaatggcaacaacataagcgcatattgtataactgcaaaccaaatcgaacctatcgttcgcagaaatggcaaaaacttaaacacttgcacgagaatgtacgcatatgaaataaatgcaactatgaaagcataatatccccaagattcccagccaaataccgcatgaagccaaacccatccgttccagccaatgtaaaacataagtagtgtgtatataattaacatggtaaatatattgagataacgaagattcttcacagccagcctccttattgatttcttttattataacttgttatgcacttataacgtaaatattaagcacttcgctcatcatagtaaaaacctatagttgttagacttgtatctaacaactataggcaccatttatatcaacattgtttttacaaatgctctttataaaaacttgttaatttttcaactgcaatttttactggttctggttggtcgtataaatcgtaatgactcgcaccttccacaacaagtaaatcttttttctctgaagctgctttctcataaagctcatgaccatctttataagaaccaaatgcaccttgcttactgccgacaataatttgcagcggctgcgttaataacgtatctgctaaatggaacgcatcaaaaccaattaccgatcccatgctcgtaaagtttagcttatttggagagttaacactttgccctcgtggcgttgtgtaatactcaactgcttctacaatatctatatcggtcatacccgctgctactaactcttcctgatttttaggaatccaatttgtaatcagttcctctgctccgcgtgcttcagcagtacgttgtttaccaatcgcctctaacaccccaattggatcagcttcacgatttaatcggccaatatttgcaccaacaactgtgccaactgctttaatgcggcgctctgtcattgcggcatttaccgcataaccaccgcccgcacaaacgcctaacacaccgatacgttcttcatctatataagaaagagtagtcaaataatctaccgctgagcgaatatcttcaacgcgcgcagctggttcttccatatatctcggtgcaccttcactttcaccttgatacgatgcatcaaacgcaagcgttacatagccttgttctgctaacttctctgcatataatcctgccgtttgatctttacagctactacctggatgcacacaaacaatcgctgcattttgtttctttccctcagcacctacaggaatatttaaaatacctgcaacttgtaatcctcttgcataaaaacggacatttcttttcgtaactgccatatataaaaccacccttacttcatttttaatttacacttgtgagagttaatactcacgtgtatatttataataaagcgagcaaccacttgtttcaatgaccacatttacgcatttgggtgataatacacacgtaacgaaatatgtgtatcaataacggaggaacacgatatggagaaaatcgatagaagaattataaaatcacaaaacgccattcaatcggcatttatagaaatgttaattacagatggatttgatgaaattacagttaaaaacattaccgaaaaagcaaacatcggaagaaaaacgttttacttacactatctagataagtacaatttattagataaaattgtggacgatcatttagaccaattaaaagaaatatgctacgagaagcaaaacaaagaatttatagaaggaacaatcatatggtttgaatacttcaaagaacacaaaccattttttgcggcactatttagaagtaacagcaccttatcatttcaaaaaaaattactaactttcatcatgggtgaaatagagaaaaaattaaatacagacacatcagtaaataaaaacatcgataaacatatcgtcttaaaatttttaggaacagctgtaatgggcattttagagtcttacgtgttggatgaaattgatagtgatgttgcgtttgttgcgacgcaagttggagaattgattaggaggaatatataaaatgaaactttaatcagtggggatttattcatcccctacctaacttctttgctttcgctgcattttgaggtgggggtcttactgcccagcaaatagcgggataaaataaaaccgcatcaatttccttaataaggattgataaaatgctattatcgttatccttcaaaactcatctatgcaattatgcataaccatccattccgttttattttcatgttacgatataaatgtaatacgacatatatcgacaaagataaaaggaagtgattgtatgaaacgttctaaaacatacttaaaatatttagcattatccgctgtttttgctagtagtgctataactctttcaacacctgctgcttacgctcaaacaacatcacaagttgtaacagatatcgggcaaaatgcaaaaacacatacgagctataatacatttaataatgatcaagctgataatatgacaatgtctttaaaggtaacttttatcgatgaccctagcgctgataaacagattgccgttattaatacaactggtagttttctaaaagcaaatcctactataagtgatgcacctattgataactacccaatccctggcgctagtgcaacattacgttatccttcacaatatgatgttgcatttaaccttcaagataacagcgctcgtttctttaacgtagcgcctacaaatgctgtagaagaaacgactgtaacatctagcgtatcttatcaacttggtggctctgttaaagcttctgtaacgcctaatggccctagcggtgaagctggtgcaactggtcaagtcacttggtctgactctgtaagctataaacaaactagttataaaacaaatttaattgaccaaacaaacaaaaacgtaaagtggaacgtattctttaacggatataacaatcaaaactggggtatttatacacgtgactcctatcattctttatatggaaaccaacttttcatgtactctcgcacatacctatatgaatctgatgcaaaaggtaatttaataccgatggatcaacttccagcgctaacaaatagtggtttctctcctggtatgattgctgttgttatctctgaaaaaaatacagatcaatctaacttacaggtcgcttatacaaaacacgccgacgactaccaacttcgtccaggctacacattcggaactgcaaactgggttggaaacaacgtaaaagacgttgatcaaaaaacatttaataaattgttcacactagattggaagaataagaaattagtagagaaaaaataaagtgaaaaaacgaagggactatttagactcttcgttttttacttactcataataagatcctgcgagtaataccgtcgctatgaaattccatgatatatttttaggcatctcttcacctttattttgaaaagcaccatcacaatcatttagccatgcttccattgattctaaataatcttctaatgttatattctcccactcatctttattttctttgaaatctttttgaaaataaaacaggaattctactaatttttcttttgaatctacaccattagccaactcataaatatccatattattactcctttcaaatacaagtaaaatcctcgatctcttcaacacaaaaacattcttttttataaaatgctatatttctcttccaaccaatcttctataacatattgtcctgctatccctgaaggatttttaattttcttcccttcttcttcactaaccatttcaaaatcgattaaaggaccatctgctctccctcggcttacaaaataagtcccctgatccttattctcaaacacaaaatctggaagattatactcccccggatcaaacaattccattggtaatccaccaataattttccaatcaccatctaaccaaccagaccaggcagtatacgccgtaaataatacttctttttgattcttgtaatagtttttaaactcgcttatccgtattttttcatctgtaaataaagaaaaatattctatatatgtttccccatcatatggccgcgtaacattttggcctttcactaacatgccgtacccatacttattaatatttttaagatttatcgcaaaaactatccctggcttaaatgattttttgcgacgcttttttaatttaaacttacaatctactacttcttgttcctctaaagaaaaactatcactctgcatttctaatgcattttttaacattatctctaactcatttatatttggtaatctgtgaggcccttcattatatatcttttcaatctcttgaaaagcatccattaaaatatcaatgctttcatcacttataatcaatttatccccttttatttcctctttataaaaagacatattttctctcctttactctcttatacatatcccttgaagactctctttttctttctatcacactaaaacacgcaccacttcttctaataataaacccaaccattcatccaatttgtttcaaaacactctaatacattcagccttctttccatagtactatttcaagatcatactcattctttagaaaagtaaagccacttctcatagatgcatctactacaataaggctagaataaattaatgatctttgagcatcatcatatccaatgaaatgtaatacttcttttatatataacatgaaatcttccaactctatttgcacaccaaagtcccaattttcatgtgcataccatagaataatcttcttagacaataaactagttaattcacgttcaaattcttttatttcattgataacttgttcagcatttaatttactcataactttaataggattcggtgtttcatcaattaaaaagtttactaatgaagcaattttcttcccgctaataatctcaaattcttttatagacggacataacattaaaaacttttctctagtagccttttcctcgaccttttctcttaacattgctattttctttaaacgttcattcacatttatcacctcatacattcagtaaattaacataataaagcgtatcatccgtttgaaaatacataaccgatccacagctataataattaacaaattgaatcggctctccaaaatgttcatagtactttttctgaatgtcacttaatttattttttcgaaaaaaattcatttatgctctacaaccctctttctactatacaaccttgttattaaagatagatttcttctttccaactactggatttagattgaactactattagattttcactttcccattttaaggtacccaaaaatcttgcatacaccatttcatttcctacttcttccaccaatagttgatctcgaatctttaatcccttttcatcatacacttcacatcgtagttggaaacctttaacacgatgaattccttttaatatcgctatcctcttacggcttgggcttttcttaggtgtcttcccaactaaaaatattccttcatagttttgcttcacaatttcatctaaagattcctctatataccctttaacaacagatgatgaaagagtagagttttcttcaagtccagggacaacatattggcgtactaatttgcaaaactctttgtatttctcttcaactgaatttaatgctaaaaagtccataaaatcatatggaacatatatacgaatttcacccaaagctctattcacttcatatgaaatatcagtgttttcgttagctaaacaaaagacagttactttttcaatctctcttaatcccatctcaaactcgctaactttctttgagaaaattagctcaaaaattctaatttcatgtacaagcaaataatgttttttaggacgtttttttttccaatcgtaaaactttacttcaagcaatataattcactcctttaaatttatcaccatgcatcggggacctatgataccttttattaatttattaaactgtactcctttttcattctatcttatctatatttttaatatgctctactcacaacgcacacggtgacataacagccataaatacatcacttctctcacctggtgctatatacactccttctgcatctaaatattcaatggaaaaggctgctagctcatacgccatttcttgatcgcattcaaaaagtggatttataaaaacctcacttcctgtaatcttttgtaaatctttcaaacagttagacttacttcttgcataatcagccacattctcattagcccaagaccacatccaactgttactcttttcagaccaagaacctataaaaacaacactaaattcaagtaatacttgaccattttttttaaactgtaatatacattgatcttgatcataccaatactcatcaaagttatagatattataatctgaaatgaatttttgctgtttactttctaatttgtcataacacataacaagataattttcgaattgttcatccgtcattgccaattatcacacgctcccttccttcaagatctccgctacaaacaatatatcttactctctcaaaacctatataaagtgaaactttaattagcccttaccaattgggcttttaccagtagcccccgcccacatatcatatacgtttctattactaagatatcttaatatatacaaagaaagaagaacttatataagcccttctttccgtaaatagtttctttacttcgtctaatttattttatcacgataaataaattcaacattacacaaatgcaccccaaccatctgtatatccaccaaactcttcacccagtttattcaattccttttgcatctctacaatatcctcataaattaagaacatttctttagaacaagtacacgtccaatcttcaaattcttcattataatctaattcacaatttaagcccagctcttgtagtctgccaattattttttctccattaccttgatcaggaattgcaataaagaaatctactatatgttttttattaaaatctataccttgcttgtataacatatttaatacttgtccatcttcatcttttgggaatttcattatttctccccttttctatagcatataataaaccttcatttggaacaaaaaatattccattacttaaagtcctctttacccgttatttttaagttttttccattctgtatacctaatatcaatcacttcttttaatttaaagtaattttcccaagtatcttgcacttgatataatgtatcacactctaaaaatacatcatcataatcatctaaatataaacctttttcaaaatcaaaataatctattgcaaattgattcccttcatcatttaacatgtcatcgcttaaaaccccatcccagaacatataaacttgagttccagtcatttttctaagcttaaatttattaatttcctcttcagtctcttctaaaaattcatcactaaataaattattatcaataatccaacctaagaacattccagtatgtacaaatgcttgctccatcggtaattcttgtgggaaatctccttcataatgatatttagctttatcgtaaattattgtttggaacaagattctcactcctatttcacataatataattgagctcaaataaataattctttgatacactttttaaaaaggtaagttgactagactctgtggggtttttgcttccaaaggctaagtctatcgctactgctcaaggttacagtgcaccatcatcactcgcaggcactatctcaaaccggctaaaattcgatatgggctttccagtattataaaacctgtaaataaaaacccctataagttacattcgaagtttgtatctaatcataaaaacgtcaaatgtttccttctaggggttaccaatatttatgattaatagaaaatctagagtttaatgtttttccaaccagaaaaaccagatataaacaattaaccccactataatcacgaaaatgaataactaaccttgtttatcctagattcatattagaaagaaagttttcaaataactccaattcaaatttatccctcgtctttaaatactctctctttttctcaatgatttgttctaatatctcttctttatttaataacaaggctaatccaatagcattttgtgctcgcgtcccatcaaatattgtccctattaatccagcctcatcatcatctcttacacataaatcaaatacattttccatatctacatacttatcaatatatggaatgaagtattccttaacttcttttaaaatatccatagtaacaggtaaaatatcttcttccttttcaacacgccaccttttttgctctctatagactaaattccctaaatcaactccaattgtataggtctcctttttctctctaattgttaaaccgtcagcccattgatttttcatattttctaattcatcaaaacgaattcccacatccaccgtcacatcaaaatcttctaggtgattgataaaggctaaatgtataccgatttttcctttatcaaattttttcaccaggtcttgttgtgtagttatagtcttataaccgtcttcttttaactcttcacctagaccttgcagtagctttaattttaattcttttttgttcatataattccttccgctctctattttgatttgtcccacgaggattagatacatgtcctatcctatatataaagaaaaaagagcctatattcgctcttccttcatatacacatttaacaaatgcatctttctaaccactaacttttctggtgatatattaatagcctctaaaagcaaactgaatatacaagtatgtaccaacaccataaataacaaaagcaactatagtaattagccaattttcacgagttttttgtacatacttcgaacatgcccaaaaaagaagtaaaataattaattgaattgcagtcacttttgagacagcaattatagtagtttccgtaacaaatactacccatgtcccgaacaacatccgaatacaaaaaataatcgccccaatacgtgtttcagtatattgtttatttatatttataaaaaatatatcttgcaacataacagttaatgttaatacaactactaaagccaagatagaaatgaattctaaaaattctataagcacttttagtctcccttttgacatcattttattataattttcattaaagattcttactatcatgtaactaggtctacaaataccctctcattatctatacagttttcgcatacataatatgaaaataacagctaagagcataaataataagtgcaatcattgtaatataccactttcctctgtacttctttacacactgcataagcccccaaaggaaaagtaatataattgattgaatcactaaaatatttagcgtccctaacagagtagctgtcatagggtaaatgatccatatactcaccaatgaacgtatagccatgaccgtagcaaagattctcctataatgagacagtcttatactacctatgcagtactcttgtaaaaatacgatagatgctactagcatatttaaaaccaaaattaataaatatccaaaaaactctatcaactctaaattctccttcataaatttatttacgatttcctatcgcatcaaaagttaacaattcactccgaagttttacaagttactttttcaaaaatactagctaatattccaataatcatcaaagagattactattcatacattcattttattactcaaggacgacctatttaaaaatccaattttttagcggacttgaaatagtcttgaaatttatcatcgatgtcctcatctttactaaaaaaaagcgttacatacgaatcccaacaaacaatttcaagttttgcttgagggtgctgaatatttggacttggtacccagagcccttcatttccatttgcatagggttctacaagcaaattattaatatcaatgtttatagacttatcaaacgcagatagtacaccccaaataaattgaggattatatttctttacgagatttgaaagatcttcacctgctatccaaactattggatgcgacattttaggataatctcggataagtttctcttcctgatgtgcgacattctccatgtctgttataagccaattaaactctttttccctaccttgaaatgagtcaaaaacggaagctaaaactgtatatttagatccatgtaaaatgaagttcatccaatccctccaattagtaacaatcgataagttagccttcttgaacttattatgtgtagataattaaacaaataccaatgaatactgttactatacacaatataatagttgttgcagtatctagcaaaatgcttacgactaggaaaattattgatttaagagcaaaagaaggccctttttctttccattgacgatagatttgcatcattgcataaattaatggaatcataccacctataatcagaataatccctattattttccccatgtttcccctccttttaaagattcgaatcaataaatatactatataatcatacaccctcaaaatatatccttatatttttgaagttattttacacatacaaaaccctctaatcatagctacactcgtattaagcgcattgttaaaagttatataatctttcattctgtaattaatggaactttccatctgctaaaaacgttgccatacagcttaacattttctaaggtattaaatttcctaagatatcaattagctcttctaatgctcttcccaaatcgtttatattgtctcgttcatcaaaacctttctccattaattcatcttctataatatctctcaatttatttattttttcagtttctatcatacgtaagtcttcataagcatttaaccatagtaaatgtttattttgtgattctaatgtctgtttcaataaaatctgcatctctttatttaatttaaacaaacttattttttcctttccttatgtattttgaacctttagcaaaagttgtaattactttaccttttttatttaaaactactacagcctgtttactagtatatttagttctaccgccactttgtataacttttttaccagttttaacaacatttaaaatggccttagatgatactcctacaccatcacgactaattgtctataccatttctttcctttcataaactcacctcgctgaaatatttttcaacacaataatgttacatattcaaatctaaatgaaataaagagtaaagtaaatgcagtttaaaaataaatacatctatcataaaaaaagaaaagacgatttcttttctcattaatgcttgtagtatcccaccccatttaatgattgataaaataagaaaagggcttttttggaatcatcggttaaacttgcaatttagttgcagaaggaacaaactgatgatgcggaaaaacgtagtatatagaagactatgtaaggagtttgtcatatgattgataacagaatttcgaaagattatgaccatgaaatagatgattctttaaaagaaattacagatacaaccatcttacttaattttcaaaaagcgattgtaagtttatatcctcatctaataccaattcatgcttttgcctatgacgcatgggatgatattgtaatgccattgttttatgagatggtatataaaacctttgcttttaaatacgggatagatattaactttaaagaaactcatacctatatgttttcgcttaatagttataaagggatacatcacatcgagtgtgttccaaagtgcacgacatttaagatttatattaacgaagaatggattgaaatggataataaaagtttgaaagaaaatgtatttgtatttaagtcatttggggatggattgcattttctaactggtggaattgaaattgcagatgcttatcgtgtaggatttgaccttgttgaggttgatattgtttctaccataacaggtcttccatctaaaacaagtatttttattgataaagagcatgtagactttgtgtttgttgcagaaacatatgatacaaatatccaaaattaaaaattttatgtaagaaagtaggaagaatatcttcattactactcatatcaaatagttgtttgaacacgctccgctattatatatacaaacttcctactacatttcatatgagaaaaagttattacgataaacaaagaaaaggtctcctaaaatatcttttaggagaccttttcttattaatagattttgtaatttaagagtaaacactcttaaattacaaaatcctccggaataaacactttcacttctttcggctgtacgtatacgaaatcacccgcttgaatgttcagctgtttgaactgttctttcgtaatttctgcttctaaatattcatctgtttcgtctcgttttaattctacatatacgatatttccgactgcgtgagaataagatacttttgctgggattgcatctacactttgtttcgtacgagagattgataagtcatgcggccttacataggctattccgtctacgtttgaaacgtgcttatgctctggtgcttctagttcgaccgatcctacatttagctttcctttatgaacgcggccgtgaaataaatttacatttcctaaaaagtcatatacaaacggacttgctggattttcatatacttcttccggtgttcccatttgttcaatgcagccttcattcattacaacgatgcggtctgcaacgtctaacgcttcttcttgatcatgcgttacgaatacgctcgtaatttgaaattcgtcatgtaattttcggagccatcttcgtaattcttttctcacctttgcatcgagtgcaccgaacggttcatcaagtaataaaattttcggttcgactgcaagtgcccgggctagtgcaatacgttgacgttgtccaccagataattgcgctggataacgtttagcaaagccatccatttttacgagctttaataattctgttaccttttcttctatcgcttctgctgacggtcttaagcttttctttcttacttttaaaccgaaagcgacattctcaaatacattcatatgtttaaagagcgcatagtgctgaaagacgaaaccgacttgcctgtttttcacgtgaatgtctgttagatcttccccatcaaatgaaacagagcctccatccgcttcttctaatcctgcaataatgcgtaataacgtcgttttcccagaacctgacgggcctaataaggcaacaagttcaccttttggaatatccaaatgaatgtctgttagtgcttgaaatgtaccatattgctttgatacaccttgaatttgaatactcaccgtaatccccctcttattggcgtttttccattcgccattcaatccagttttttataatgagtgtacacactgcaattaatgacattaacgtcgctactgcaaatgctgctgaaaattgatattcattgtacaaaatttcaatatggagcggcatcgtgttcgtaatgccacgcacgtgacctgatacgacagaaacggctccaaactcaccgatagtacgggcattacatagaatcatgccgtataaaagaccccatttgatatttggaagcgtaacgcgccaaaacattttccagccacttgcgccaagtgataaagctgcctcttcttcacttttcccttgcgcctgcataatcggaattaattcacgtgcaacgaacgggaaggttacaaagattgttgcaataataatgcctggtacagagaaaatgagtttcactccatgttcaagtaaccattcgccaagagcacccctcggtgtgaaaagtaagacgaatactaatcctgcgataactggtgacacagcaaacggcagttcaataagagagagtaatacttgttttcctttaaactgaaactttgtaataagccacgcggccgctaccccaaatatcgtattaagcggcacaacgattaacgcaacgagaagcgttaatctaattgctgaaaatgcttcttgatctgtaatagcggcaatgtatacatccatccctctttcaaaggcttttagaaaaatagttatgagtggcagtaatagaaagagagataaaaataaaactgtaatcgtaattaatacgcctggtacaagcttagattcttttttagctgatacgctttttactattttcttttctaataatgttggttccattttctctcctcctattcactttttagttcatgccttctactccagctttgaatcatattaataagaagaaggaaaaggagggaaataataagcatcacggtcgctacagctgttgcccccgcgtaatcatattgttctagtttcgtcataatcatcagtggtgcaatttctgttttcatcggcatattacctgcgatgaaaacgacagatccgtattctcctaatgctcttgcaaatgcgagtgaaaaaccggcaagaagagcgggaaagatttctggtaaaatgattttcacaaatatttgtaagcgggatgcacctaaactcgaagctgcctcttctacttctttatcaatattttgcagcactggttgcaccattcgaacgacaaatggtaaaccgataaaagtaagcgcaacgataattccgagtggtgtaaaagctacttttatatgaaacagactaaatattttcccaatccatccattttccgcataaagcgttgtaagtgtaataccagctacagctgtcggaagtgcaaacggtaaatcaatgagtccatctaatagtctttttcctggaaatttgtagcgtacgagcacccatgctattaataaaccgaaaatggcatttacaatagcagctgcaaatgaagttgtaaaactaacttgataggaatgcaacacacgctcgttcgttataaccccagcgaacttcttccaacctaactgtgaagtttgaataaatacgatagaaagtggtataagtacgaataaactcatgtacaacattgtaaatccaagcgataatccaaaccctggtaaaacacgtttcttcctcatcctctttcacctcatccccctttagcagtacgcattatttttgataaattttatcgaatacgccgccgtcattaaagtgtttctcctgcgcttttttccagccaccaaatagttcatctactgtaaataattgaactttcggaaattgagatgtatatttttctgctactttttcattacgtggacgataaaagttttttgccgcaatttcctgtcctttttctgagtacaaatattcaagatacccttctgctacttttttcgttccttttttatcaacgactttatctacaaccgctactggtggttctgcaagtacactaatagaaggggttacaatttcaaatttatcttttccaagctctttttgggataataacgcttcattttcccatgcgattaatacgtcaccaattcctttttcaacaaatgttgtcgttgctccgcgcgctcctgaatctaatacttctacgtttttataaatttggctaacaaactctttcgccttatcttcactattattatattttttcagtgcgtatccccacgccgctaaatagttccaacgtgccccgcctgatgtttttgggtttggtgtaatgacagacacaccttttttcgttaaatcatcccagtctttaatacctttcgggtttccttttcgaacaagaaatacaattgttgacgtgtatggagtggaattattcgcaagtcgcttctgccaatcttctgctaattgttttttcttactaatcgcatcaatatcataagcaagtgctagtgtaacaacgtctgcttctaagccatcaataacagagcgcgcttgacttccagatcccccgtgtgattgttttacatttactgtttgcccgtgcttctctttccaatacttcgcaaaatctttattgaaatcttgatataactccctcgttggatcataagaaacatttaaaagctcaactgtttttttatctccacttccttcagaattactagtggatgttgccgaaccacaccctgataaaagtacaactgctgataataaaacacctgtacttttcataaacgctgtcttaccccactttttcatcgttaagcccccttagtttatacaatagaaaaaggcacacaatatattcacaaatgtgaacattgtgcgccttcagtttatctgattagcttctaatgtattctattcgatttcttttcattttaattctgtaattcgcatgtgtcaacttggaatttgaattttcttattaaactaaaatattggcatacgttgagcccaatgatttttcaaatcagcaaattcttttggtaacttactattttcattccattctaatttatatgcatttactaacaccgtagccattgattcacagtccactactccattttgattaaaattaccgttcttatcactttcagagttcatccataatttaacaaataagatattgcacccgacgtaagcgttaatttcttctgttctacgtatgtcccctccttgttggtcatatacaggtttaaatatatggcaccacagcttaatcaatacaaaaaaaatgaggcaaccacctccaaagatggttgcctcatttttacacttgcatcgctttctctctcaatgctcttcttaacaacttacccgtcgtattcttcggcaattctattaaaaactcaatgcttttcggcactttatatttcgctaaatgtaacgtacagtaatgcattagttcttcttctgttacgtttgcttgcttcaaaacgacgtacgctcgcacagcttctcctaagttttcatcaggaacaccgattacgacaacttccgctactgattcgtgcgtatataatacttcttctacttcacgagggtatacgttataaccgccaactaagacgatatcttttttacgatccacgatatagaagtaaccttcttcatccattttcgccaagtcacctgtatatagccagccgtctttcaatgtcgcagctgtatcttctggtgcattatagtatcctttcataacgttaggtccgcgaacaattaattcaccgactgcgccgacaggtacttcttccccaagttcatttacaattttattttctacatgccaaatatttgtgccaattgatcctggtttccgaggacgatctagcggattgaaacaagtaactggtgatgcttctgataaaccgtatccttctgaaacaataacgttaaaacgtttttcaaagttttgcagaagagcaacaggcatcgatgcaccaccggaaatacaaaggcgaagcgtcttcacatcttctgcgcttgcttcttcaaataaatataaataattgtacatcgtcggtacgccagcaaagatcgttggttcgtacgtgcgacaaatacggaatacttctttcggactaaatttcggtaacattaaaatcgttgccccgttcacaatcggtgcatttaccgcaactgttaaacagaatacatggaacataggcagtgccgcaacaacgcggtcatcagccgtatattgtaaatacgacgccacatcgttcgcattactatataaatttttatgtgttaacatagcgcctttcggttttccagttgtgcccgatgtgtatagaataaccgctacatcttcttcatctagttcaggaccttcgtaagttgtatctccagtccccacaaaactagtaaacgttttcattttttcggtttctgtatggttaaaatctgatgaggtttcgcatatgatgatgttttctaatgaaggaagtcttgttgtaagagattgtataacaggtagaaggacgtcgagtacgatgattgtttttacatctccattttgtaaaatataatgcatttcgtctgctgtataaattggattaactggaataacagttgctccggctttcattgttccgtataaaccgaccaaaaaatgtggtgagttcccaacaactaatgcgacattgtccccttttccaatgcccatttctgctaaattgctagaaaaccttgtgaccattttgtttaattggtcatatgagaccgactgatccataaatatataagccggtttttcccccttcttttttgccgtttcagccaaagattgaacgagattcacaaaaaccccacctttataaaatttagaatatttaaaaattctaaattaattatattaaaagaaaattaaagtggcaagtgatattctattaactgcatatagacagatcaccttctcttagtttactttggaaaaataaggggattttatttacaagtaatttataacactagaccaaaaatcattttaggataatatgcactcatcttttctctaagtttatcaagttcctctttatgtaacgtcgtatgctttccaaacaagttaagagcgtccgctccatcttcatgaaaataaactgtaacatataatgccggtaaccctatattgtcttcatctattgataagatgacatctggtgttttattaacagtgctgaatgtttcatttcttttccacttcttattttgaaacatgtcttgtatatcatgtatctttcgtttgttatctgtatgcgtaaaatatataacattatcctcagccggttttccgatagacaaaattgtacgacttgagggcgatccactgttacacgctgtcattccgacggcgaagctgagtaataatacaacgtacattacccttttcatttcgattcgcctccttttgaatatatatattcctttacgaggggcaaatgtcctgtgattttatgttttgtggtaaatgaaattatatgagcgatttttcagttatatcagcgccgctcgatttatatcggcgatttttcaaatatatcagcgcaactcggtttatatcggcgattttccaaatatatcagcgcaactcaatttatatcagcgatttttcagttatatcgacttaccgacaaaacctgacaatctacgcaaaaaagaaagaggctgcccgttatggaagcctccctcatttttagaagaataaatgtaagaaatcttctgttgtaatgttaccgaagtagcgtgcgatatctacgccttctaaagctgcagtgaatgcatctttatcgaactgaacgcctgttagacgctcttcgatatcatgaacatctagtgaaccgaagaagtcgccgtaaattttacattctgttactgttccctttttcacttcaagacgaacgtcaacttgtccaactgggaagcggtgtgaatgttgtaagttgaacttcggtgattttccgtagttccaatcccaattttggtaacgttcttcagaaagtttatggattgctttccaatcctcttctgttaattcatacgttgggatttctgtttctccttcgaaaattgtttctagaagaagttgtctaaactcttctgtcgtcatttcttcgtttaagaactctgtaatgttcgcaacgcggctacggattgacttaattccttttgattgaatcttatccatttttacttttaacgctgatacgacgtgatcgatttcagagtcaaatagtaacgtaccgtggctgaacatacgacctttcgttgcgaactgtgcgttacctgaaatttttctaccttcagctaaaatgtcgttacgaccacttagttctgcatttacgcctaatttactaagcgctttcgttacaggttctgtaaattttttgaagttgctgaaactgtctccatcatctttcgtaataaaactgaagtttaagtttcctaaatcatgatatactgcgcctccgcctgatagacgacgaacgacatgaatacctttttcttttacgtaatctgcattaatttcttctactgtgttttggtttttaccaatgataatcgaaggttcgttaatgtagaacagtaaatatgtttcgttaatatctaaatttttcacacaatattcttcaatcgctaagtttattctaggatctgtaattcctttattatcaataaataacatcgtatcacctcatgagttccatacgtagccactatgcgctagcgtaatgtggccactgaaaatttgttttgcttctgttactaaatcagatgggttgcctgtatgcggtaagtgcgttaataaaagttcttttacattcgcatcttttgcaatacttgctacttctgtactattcatatgccctgcttttgcagcctcttgatgtgcatacatattacactcacaaatgaaaagatcagcatctttcgtgaatggaatgaattcaggaatataacttgaatcagcgctgtatactacagcatcatctccagctgtaatacgcatcgcaaagcatgtaacaggatgaacagtttttaagaacgaaatcgagaatggtccaacttgaagtgtttcttctggattgtacgcgattcctttcgtatgtggttcatgcgttaaagaatggaatccattctcgtcaaaggtatggccgtatattggtaattccggtagttgccccttcgccccgctcataattaatctcgcatattgcaataccccgatatccgcaacatgatcatgatgatagtgtgacagtacaactgcatctatatgagatggtgttatatatttttgaagctgtgctagtacaccactaccacagtctacaagtaaacgaaaaccatcgtgttcaaacaaataccccgacgttgcttctcccgcttctggaaagccgccccaaaagccgacaacagtcattttcatatgtatccatcctttctaaaaccgagtagaaatgcatgttttacttacatcctacattgttaactataatccatttcctaaactttttcattaattttcaattttgttataaaacagttgttgacttttattttttgtactaatacaatgatagtaagaaatggaaatggagggattgacatgatcgatcaaccaatggagtttttcagaaatttaccgacgaaaacttgtgcgcactgcgggaaagaaattgatgagcaacacgaagcataccataacaaatgtgacgattgcgttcacgaagaatagtagtttgtgaacataaaaaaacctagcagacatagtctactaggctaataacatcttatccttcatcgttgaacctttcaccaagagctccagttcaaactcatacaattctttttttcgataatttttcgtatggattttatccatcatcaggtcgacaacttttcgggccatttcatcaattggctgttcaattgtcgtaatacctggttctgtaatctgcgataatatttgattatcaaaaccgataacagcgagatcatctggaatgctccagttatggcgtttcgcctctgagataattccagctgctacctcatcgcctcctgccaaaatcgcggtaggattttttttgtcctttaatacttcatggaatattcgttttccatcttcccaagagaaagcgttttcaagaaagtcaatcgcttctacttggcggctcttctcagttattgcacgtaaaaagcccatttttcgctgctggctaacgactttggtttcgttaccacggcaaaaaataagattacgatatccttgatctaacacatgcttcgcagctatgtatgctccttgcgcatgatcaaacttcactgttggaatatttgcttcctcaatatattcattacacaacacgattggaccgtgctgtaagtatggctctacatcttcccacggattttctagtgaacatagaataatcccatctacttgtttcgtagataataattgtaaatactccatctctttttccggtaaatatcttgtttgacaaataatcagtttatatttatgttcagaagcagcaatctcgattgcttcaataaatctactgaagaaaggatttgtaatccttggaactagcaccgcaattgtttccgttttttgtttacgaagccttctcgccgcagaattaggaacgaagcctaaatgcttcattgctaattgaaccctttttttcttctcatctgaaacatatggatgattattaatcaccctagaaaccgttgtccttgataaccccgctaatttcgccacgtcctctatagtcgacacgaaattctccccctttgcatgaaaacgttttcttaaattgattatatagtatattattggaaactgcaatatcggttgttatgattttactatattaatattatacataggtaaaagtctgttaatgcatgggcaatatactgcttttagaaatttacgttatgtacattccttttcttaataccatatatcctttattcaatataaaaccccatcaatacgtcatctccatatgatccatcttcatactttatttgctttcgttgtctgccttcttctacaaagcccatacgtttgtacactttaattgcccgatcattaacagaaactacacctaaacaaattttctctaaacctttctgccctttcgcccaactaataagaaattcaattaatttcgtgccgatgccttgattacaatacgcctctttaatccccattcccattgtgcctgcgtgttgtaaccgttctagttcatatcggttgaaaattaaaaagccaactaccttcccatctacttcatacacgatataaagattacctttctcattacttttccgtatcttttctctttctgcattcatatcattcggtaacttctttggggatactatgaaaaattttgtagtagtttccgataatataatttcttttctaatattcataattgcttctgcatcagtctcttttactaaccgtatcattaaatcacctcgtactttttcttttgaaaaataatattacaactataaaacgcccaatatgcaatattacatattgagaatctttttactcttgatacaatattcatacatcaaaataaaaggaatgtatgcaatgaatccaatcttaacagctgcaaaacaactattacataaagaagaaaaggttttatctactttaaaatgttcacttactggctatatgattacgcataaagtcccgtatcctggcatgttacttgctactaatcaaagacttctcttttttagccaatataaaaacacattcattgccgaatttgattatgaaaaaattctatccatagaaacgaagagaagaatctttgacaaaaaaataatattttactatgaagatgaatatataacgcttggatacattacaagttcgaatgttgaagcgttcatagacttactacaaagaaacagcaagactagcacaggcttataatcagcggggatcccctcgctgattcattattttaactcctcccacttcgtccaaacttccctcccgtttatacagtacatattatcctctctattcataaacccctgtacaataaattcacgtctaattgtacaaaaatcatcatgatattgttttataaatgtattcatttctttttctgtatattgattttcagcatttaacttgctaattaaatgctctaacaatactagttttttcttcttttgacctggaatcgattttaaacgatcctctttatcgaaaaagttacgaatggtcgtatcccggaatttcatttcactttcagtcattttattgtcctccattaatttttatacaacaaaactttattgtttgtccttactattcttcttcattctttcacttacaacatccataaagtaatacccactaataagcacatagtaaactacaagtattcctagtgcatctttcatatttatatatttttctttatgaaataagataggtgaaagggcgtaaacaagaaagatgattagcggatttaagataaaataataagtaagatttcctttcatcatatcaactcctctattctagttttctctgtaaattgttgtaaatccttttctttcgtttaaactgcacatgcgatatggtgaaattaaggagaaggatgattataaatgatatttcactctaaaattgataaatttttcttattcattatcttttttgctatttttcaccataggtgcttcaacactgcttcctctcttattcgataatgaagctactacgacagacgtatatattctactacctattttctttgtatcttctggtttcctattatggaattccttttcatttttactcctctcacccacactttcttcaaactgacttaccacttttacatttgcaacctattattcaaattaacaaattaaaaatggtaaattatgttacaattaacttatacatactttggagggtacatagtgaaaaaagctattatagtattaagcattctatatcttattttaaccgtacatacaggagctgttcttttaggaaaagaagattatagaagtgctatcaatacattaaaagaaacgaaagaagtctcttcatttcaatctgcaaaagacggtgtgattttattaaaaggagcattaactactgcgcaacctattacagaggaaaaacttcaaaataaagaattcgcactccttgaaattaatacgtataaacgacgaaaagcaaattggataaacattgatacagagcaacatattgcaaagcagctcttactaaataatgaggttcttcctgcattaaaagaaattcgtttttcgatggaaccaattacactgtcaggaaaagatatttccatcgaagattactcactaaaaaaggatgatactcaattaacaattaaaagtaaaggataccgatatacgggaatagaaaacaaatcagacactcttatttttggcataaaaaagggggatacccttgaagggtatagtggttctgaaattctaataggaaaaacaaaagaggaaattgctagtaatatgaaactatatacttttgctgaaaaatatggtccatttatttggattgtagctacaattattcttataagtatcgttatatacttgttccgtaaaaacagaaaaacaaatgaactttctcaaccaatgaagtgaaactttaatcagtgggggtttcttcatcccccactgattattagccctcaccaatcgggctttaatgggcagttgatccccacctaacttctttgctttcgctgaattttgaggtggggtcttactgcccatcattaaagcgggataaaacaaaactaataaaaaaagcaccaaaaaggtgcttttatctacgcttcaaccgattgattttcaagcacatttttaaattttcgtttgtgcatcaaagttaaagaaacgattgttccaaatgataatacaacgataaaaatcatgagtattcctatgtttttccacatgaagtcaaagtctccactcgatacgactgctttcaatcctgatacagagtatgtcatcggtaaccaagcattgaatggttgtaaaaacttcggaatcaattctagcgggaatgttccggcactcgttgtaagctgcataattaatgtgatgatggcgataaaacggcctgcatcaccgaatgctgttactaaacattgaattaatgcgataaatgctaaacttgtaatgatactaaagagtatgaagtatggaatgctttgtacttctacacccaatccgaacagtaatataacatctgctactatcgcttgaataataccaactgatagtaaaacaccgaacttactaataaaccaactaaatcctgattttggaacgcctactgtatcacgtaatgggtatacgatagataataataatgccccaacaaataaaccgagtgataagaaatacggcgtaaatccagttccgtagttaggaacttccgccattttctctgtcttcacttttacaggacttgcaaacatatcatacgttttatccgttccttttacttccccagttttctctgccccttcgccaagtttctctgcaagttcacctgaaccgtcgtttacttttacgagaccatctgttacttttcctgagccatctgctagtttatttacgccgtcgattagctgggttgagccatttgacatttgatttaggccaccatttagagtacctaagcccgttgttacttgaccagatccgtctgctaattgatttactccacctgccatttgatttgctcctacagataatgtccctaaaccgcctgttactttactcgagccatctgctaattgatttactccacctgccatttggtttgctcctgcagataattgacctaggccgcctgttacttgacttgagccatctgctaattgatttactccaactgccatttgatttgctcctgcagataatgcacctaaaccgcctgttactttacccgagccatctgctaattgatttactcctgcagataatgttcctaaaccacctgttacttggcttgagccatctgctaatttcgttacacctacagataatgtccctaaaccgcctgttacttgaccagacccatctgctaatttggatactcctacagataatgttcctaaaccgcctgttacttgaccagacccatctgctaattgatttactcctgcagataattgacctaatcctgctgtcacttttccagagccactttgcaattgcgttactccatcaattaattgaactgatccatcttttaatttatcggcacctatttttgcattatctaatccctcaccaaatccatgaaacttactaacaaattcattttgtgcgctcgttagtttctcaatagcacctgctagagtttttatccctgctggatttggtaagtttttttgcaacccatttgttgtttgatgtatttcaccttttaattgtttcacttcttcatttaatttatttgttccacctgctactccggcagctttttgctgaactgtcgctgtactttttacagcacttgttacgaatggctgtaactgctcttgatattcttttggtaaactttcaatttgcttttgtaaattcgctacctcttgtgctgcattttttgcatctcctgctgttgattgtgtaagttcatttaactgatttacattcgccccagctccatctattttttcatttactgtattcaatatagaaggaactttcgactgcatttcctctaagcctgcagcagacttttgtacgttactatttaactcttgcaatcccttttggatcgcttgagaaccttcctctaattggctttgcccttcaacaagttttcccataccatttgatagatccgttgttcctgtttttaattcaccggatttacttactaatttgttcaagccaccggtcactttctcagatccatcacgcaactcacccgttttactatttaacgtatttaaaccgtctgttactttgcccgatccgtctactaacttcccaatacctgcattgctatttaatgcatgtaaaccatctgttactttgcctgatccatctactaattttccgatacctgcattgctatttaatacgtgtaaaccatctgttactttgcctgacccatctactaatttccctatacctatctgcatttcacctgttttgctatttagcgtatttaaaccatttgttactttgcctgacccatctactaattttccgatacctacctgcatttcacctgttttactatttagcacatttaaaccgtttgttactttgcctgatccatctactaatttattagatccatctgctaatttctgaactccatccttcatctccccagaattcccttgaagtgtatgaaggccatccgtcactttacttgaaccatcatgcagctcacttgatccgtcgtgtagtttatttgctccttccgccccatctgctaatccttttgagacgtcttgaatggaatcaaacattttctctgcatatgttttcgttaacgtgcttgatacttcagttttaatcttttcaatggctgttcctccaatttgtgaagataagaagtttaagctttcgtttggaatgtactctaagtttaatggctttggattgtcttttagtaacgttgtagcgttacttgagaagtcatctggaatgcgcactaacatgtaatactttctagcttccattcctttcttcgcttctttttcacttacgaactcccatttaaaacttttattatcttttaaattatcaacgagcccttttccgacctcaattgatttcccatcaaatactgcgcctttatctaaattgactactgcaactggtaagtcatctaactgtttatacggatcccaaaaagcccacaaaaacatccctgcatataaaattggtacgaataagaccgcaataattggaattaatatttttttactttttataatttccgtgaactctttccgaagtaactgcttccctttcataatttctcccccttttataaaatgaccaaaatgttcatatagtcatttttacccaaacaaaaaggctatacttgttcatacatatgccttatccctgaatttattactatgcaattttttcttattatgattataatttttctatatccccccttaacttaaatatatgaccgaattgttcatttggtcatttttttataaaattaaaaggattatcttagtttgacaatccttttagtaaataaagttcaaataactctgcaattttttctttttctagcggttcgtgatttttttcccaatcaaaaataagcgatacatatagacgaagcataataaatgctgtaatttctggatcacatttgctaatttcacctttttcaatcgcaatctttaaatacgattgaataacagaaacgatttccacatcaacttgttgcatcacttcttgtacttctttcgttcccatatcgcgctcttcttgaattaatttaatcatgagctgatgttcttttctaaattccaagatgctatataatgctctatgtacattttcaaaaaatgaaacatctgaacgaattgcactttctgcaacttgcttcatttctgtaattaaattagaaataatttcaccaaataactcttctttatttttgaaaaaagtataaatcgttcctttccctacattcgctaacttcgctacttgatccatcgttgttgctttatagccgaacgctgaaaaagactttgttgcagcttcaataatagaacgttttcgatctatcgccacattgtcacctccaaaaatgaccaattggataatatagtcaatcagtacatctttgatattaccacacgcttacattctatacaagttctctttttattatttccagtataaaaaaatttcagtcagtgtatatcatactttccatagtttatcagaagaaaagagaaaaggaaaagatgttctagagatatacatcttaagaacacctttttgctatttcaacatagaaagcataattttctctaattcttctttatttacattcttatcgaatactgcttctcctgggttctctaaactatgattaataataacgatttggtatgcacgatttttcccttttgctggaacaatcatcttcataccttgtaaattcctatccgagttatgagtcgcatagaatatttgattaccttctaattcgtactgttcaatattttcttctacaacaaataaaccatggaacggatctttactttctccaaatacttgtgattgataagttgtatagtttccttttccgtttgtatactctaattctataattaactcgggtcttctcttaataaaacaacttaccttttcatcctttagatcgtagccttcaattgtgtaagttggcttcttaatttgaaaatctacatgttcctgcgcttcctttaccgtgtaatttaaagattcttccactttgtcattaaacggttttgattgatcataaagtgcatataatttttcacgatcagtttctgttaaacgttcttccctaaaaaatattgactcgtagtcagaatctctcggagcaccttttttctgtatattaataatttctttatacaattttatgtactgttggaactcatctgttgttaaagccttttcagctaaatataaataatctgtcttattttcatacactcttgctgaatacctatattctttttttgcattttcttctgtaccaaacagcatatctacagcatgttggaaagcatcctttgactgctctactttatccttttgtttttctttcccttccgttgcacgtgcgttgaataaagaaagggatgctatagcaactatgacaataactccaagtaaagaaagacgatacgatttcttttggaattttttaatcataatgattctcctttttagtgttcgtttatttctacttaaatttgccaggcttggtaattgataggaatagtgttctaaaagggtaataattgtatgaccgtatgcaatttgttcctctttatctataaaagtaagtgcatatgcatcacaggctaattcttgatcttctcgcatacaaaaataggcgtaccaaagaattggattgaaccaatttaataggattaaactgtacataatccaatttacagctacatcgtttctcttaatatgagctaactcatggtaaaagacatattgtaattgttgttcatttaatactttcatatgtttttttgatagtaatactttcgggcgaaagaaactaaaaaccgttggacttgcaatctttcctgcaagacgtaatgaaactgccttcttcattttcatagactgcttacagcgattaaacactgtagtgacctgttcgtccgtaatatccggttgtttctttatgtaagaatataaacgtctatttgtaagaaacgtgatggctgctaatatgattaccccagctagccacacatacaaagcaagtttgtataaagaaaatgtagtctgtttttccgaactgacttttacttccggttcgctagtttttgtcaccattttagaatttgattccaattccacttttcggtcgctttctatgttcactatattctcagtagccggcatattttttggaataacttccgatacgctagaactataagaaagtaatgagtaaatgctataagagctatctggcgaccacggtaaaaggagtcttatcattaatacgatccacagcatatattgccaccggggggttaatttatttctgaatagaacttttatacacaaaataaatccgactaatatgctagccataagtgacgtttctataagccaatcaaaaaaatgaggaaggtatacatttataagcgtgtttatcatttttatcgatccttcctcttattctcctctgtcttctcatctaaaatgcgttttaattcattaatatcttctgaagataatttctcctcttttaagaaattaacaagtaatggcttaaacgctgcaccgcaaaaacgctttagtaaagatttcgtttccacttgcaaataattatcttgtgatactaacgggtaataagcgtacatacgccctttatcttgatggtaagaaacggcttccttttgcactaatcgattaattaatgtgcggattgttttcggtttccagtccattgcatcttccagttcttctataatttcattcgctgtttgcggagaattcgaccaaagcactttcataatttctaattctgcttcagatattttaggtaattgatttgtcatagtatatttcactcctaagtattacatttgtaatctataattaagattacaaatgtaatacttaattgtcaaccatattttagaaaaattaatttcagctaaaccttacttaccaacaacaaaattcctctttttcaaataatcaaataaaaaaacaagaaaatctttacaattaatagtaatatagaaaatagacaagtttatcaaaacagtggaggctttttcagtcatgatgcgtgcacttcgtttaaatataaagcaagctttttgtaatcgtgtttctttaattattatgtttagtggactagctcttatttttatttaccattattattatgtaattcgttacattggggatggaacggatgcgtttgtaacaacagcttttaaatggattggatttcgcgacaatgaaatggatgtttatttattattaatgcccgttattgccagtttcccctttagtacaagttacaattcggataaatcagatggttttaaaccgtttgtaagtaaagggatttctttgttcccttattcagtaacgaaatatattgttacattcttttgtggcggacttctttatacattcccgttcatcttatcgttattattttgcaaattaaccattccagacggagaaccgacggctggttcaggcattataaatgataatgggatgtttgcaaacttatattacgaatctcccctcacttacattactgtatatatcggaattaattttttatttgcaggtttaatggcccttttaggacttgctgcatctgcgtggtcacaaaaggactatatggcgattcttttcccatttgcagttgcctccattccatacgtcctgctaaatacgatattccctacaataggcggagctccttttcatttatatgacccaaaacaacctttgcatggcatgtcgccgtatattttgacaatacaatgtgcattcttcctcctcgttagcttaatcatgtatatacaaggagtaaaacgtgataaaaaaaaatatagaagaaggttgcaaaaaagagagcggtgtagaaaagcgtttcaagtataataaaaccctaatttccttactatattggaaattagggttttatttactattcacttacggtgtaccagccaatccccataaaataacaaccgctacaaaataaatcgctttaatacctacaactaaacataatgaaacaattgcatatttacttaattctcttcttgcacctattaaagtgaaaataaccgccaaactaaatgttatataagaagctgctgtatgtattaagttatacgtaatatctagattgcttgtaagtcctgttatatcagctacaaactgaagcatgatgatcgtactaaaaaaaattgcaaactgattcattacctttccatttatttgtaactgcattgttgtcccccttattaaaaactaaatattcaatcaattttatcgttagattacaaaaaaaggaatcatctctttatactattctataacgatgcaaaaaaagaacgcttagtcacctaagcgttccccactttaagaagccttcttcaaatcaatttgagcaagtactgggtcgtggtcacttacacgtccgtgttctttcataatgtttgagtttaagtgtactgggtctacaattgtgtgtggtgcgatgttgtttgttactaaaatatgatctaacacttgtgcatttccttcgtgaatgtacgtgtaacgattctctttcggcactgtgtttaacatatcttttaagattgttccctctagtgtttttagtggtttagagaattcgaaatcgttcatatcacctaacacaacaactggtgcatttgtattctttttctgaattccttgcacgaaataatttacttcttgtgctaactgaattcgtttgtcttcactctttaatacgagcggctgcacttttccaaatggcgttgcatctcctagttttgagtttaagtgatttgcaacgacaacaatgttttgtccttggaacgtaaattctaccgctagcggtttacgtgtactttcaaacaatggattttcgtctccaatacgaacaacattcttatcaagtaacttcggtaccgtcgctaatttcacgcgtgatggattatagaagaagccgacgcgaatattcgctcctggtgctcctccatcttgattattgtttggagcgatttctacatactcatacttcggtccacgaatttctagaactgcatcaatgatacgttttgcgcttaatgacgcatctgttgtaccgtcattaattgatccgttattatcttgcatttcctctacaccgataatatctggcatttttaaattgtatttaatagaatacgctaacgcttttactttttcatctgttgtttcttttttattcgccgagaagttttcaatgttatatgtagcaaccgttaacttatcaagacgtggctgaatatttgcccctacttgcttaaatccaccatccactacagctggcagttctgttattggcgaaatacggaaagaaccgtaatcatatcctactacccctgttatatctccagtaaaagtatctcctacttttgctacataatcgcgaggtacttttacagaaaggcgctctgggtttaattgattttcatctaatagaggtgtgccatattgtgttactattttatctccaccattttttactgttacatataaatttccgtttttctgaggtgtaataatttttggtgttggcatcgtaacacgcataccttctatactttcatagaagtcgattgcatcttcatttggatcaaataaaccaaatgcatcattatcaataatctggtccgggattttcacaccgttttccccaagtacaatcggtgctggcaaagattgatcttttgcgattacagcaacgcggctcgctttaatttcagtcgtcgttaagtctgtttcaaatcgctctgcatatcctggtccaacatattcttctactactccatcaacttgaataagatctcctactgctacattcacatcttttttatatacgtacataccttctgaagtagctgggtcattatctggctgattatcttctatataaaagccgtttttatcaagcgctgtgacaacgccttccacattgtttactttcttcccgttgtaaggagacatatgtgatttcccttgaatgtcatgaatacgaacctgttcattatttacgataataaatgaaaatgtcgaaattgctgaaggagtaagtccttctttttctgcgattgctttcactacactattttcattgactataatttgtccattataacgaacgcttttattagtaggattagagccatctaacgtatagtagattgttgcgccttctgtattcgtcgttaatgttaccgctgttcctttagcaacttctccaccgttcggtgaagctactacatcgctaacacggttttgtccttcaccttgaaacttataagctgttactgattttagacctgggttactaaaatataattcaagggtcccagtcaaactaactttcttcccgatattttcagggtgatcttttacattcactgccgttctcacatcacctttcggtaactgaacgggcatgattttgtctggattcgtttcgtttggcgaatctgcaattgctacgtttgtatcatcaaacttagctggatccttcgtatatttagaagaactttgcgtatatccaacaatatatccttctactatccccttcgttttcccttgctgcttaaatacttgaattgctttttctactgacatagaagcagtttcttctgcttgcgctaaagttccagtaaatgaaagcaatagcaagaatgataaaaagacacttaacaatttcttcacagccattttcctctctctatttcatattttctcagcatttctatcataacaaatgattcgttatatagaactatatttcgacaaattttacaaaagatttatttaatttacaagctttcaaactataatacaaaataataattttacaccttctacaaatacactctataatgttagagagaaaacagaaaatatcgaaagtttattggcatgtaaaatggattcatttgaataggagtgattggatggaagtgcaaacagaaacataccgcgcagctatgaatggaacattagaacgtcatttttcagatatgattgccgttataccaactagaattacaattgagcagttaaaacagcgactagaaacgatcgctactaaagttgatgatttaaaaattgtttatagtgatgagacaagccttattgttgaattacatatgggtgaaacagtcataccgtatgaactgcatattgatgaaccgaacgatccagaaggatataaaatgtacaatagacaagatgctacaatcgtagatcgtaattttgaagatgcagctttcggcactgaaattttcactcgtacgctatttgtaggcgatgtactggactgctttttccagcagttacagttcttatggaatctcgccccagatttgttatttgtaatcgattcaagtgcagcaatgaaagtgatatctagaagctatattgaatatcacgttgaaaatgaattattacctgacattcctgacttatacgttattcattccatttatgaagacgataaagacggtgagcctacgcaatattggtttcatacacacggtcttttaagagcaggcgtaactgaaatagagttaattattccaaatcgcatttcttcctactacggcattagcgatctctttcaaacatttgctaataatgccgttgagaatggacaagtccctataaatgagcctatcgttatcgcacatagtcagcaaggttctatacatacagtcgctgttccgtgggaaaaaggattatcttatatagggcataaaacgagtatggaccaattatcttcaatcgaggatgaagaagtgaaactacaaccaatagatgcacaaaatacattcttaggcggtatggatgaccgagatgaataccatcaatctccatctgttctcttattcaaatttaatacttcagaagaatatattgaaagctttttccaagaacacgaggaagctacagggctcatgttctataaaacaaatagtgaaactgatcgtatggcttacaatgcgaagaatactttcgggtatttcagcaacatttttcacattgaacaatcaaatgaagattttcgtttccttgctaaatttggtgtatcctacgaagagggaaaaagtgaacatatgtggtttgaaatgcaaaacattacggaagatttcattcaaggaatactcattaatgaaccatattttatagaagatatgagtgaaggaaatagttatcatttagattttgataacttaacagagtgggttatttatgcaggagatgctgttataaagccaaataacttatatatgtttattggcgaataagtattttatataataaacgaaacgccttcaatatgattgaaggcgtttcttataatttattgtgcgattaattcagcatctattactttctccaaatgagataatacacgctttgcagcttcctcaccttgattaatacagtctggaagtccagcgccagcataggagctacctgccaagtatatacctggcaactctttctccataaatgttgtgagctgtttcattcgctcgttatggcctactgtatattgaggcatcgcttctttccagcgacttacaattgtaaactctggatcctctgtaatgtccatcgtcttctttaaatcttctagtacgagctgaacgagttcttcttcagtttgttctacaaccgcttcatcaccagcacgcccgacgtagcaacgaaggagtgtttttccttctggcgttgtatgcggccattttttatgcgtccacgtacatgctgtaatggtgtaatcgctatttcgtgatacgacaaatcctgtaccattaatatcacgctggattgcagacttttggaaagcaagtgccacatttgcaacggatgtggatggaatattacggaagaaacgaaactgcttgtactgagcaaacatggacggcaatactttatgcgaagttgccactacgatggcgtccgcttctatttcttttccgttactaagagtaattgtataaccatcaccctgttttgcaactttttcaatgcgagttccctttattatcgtaccttcatgcatctttacttcgagagattttacgatagattctaaacctgttttcactgtttggaacattccctttttcggttcagctttctcttctttcggagcgagcgtacgcataccgagtgaaatactgcgatgtttctgctcaatctgatacatttgcgggaatgttgacattaagctcatttgatcaatatcccctgcataaatacccgatagtaacggttctattaagttttcaaccacttcgtttccaagacgatgtctgaaaaattgtccgagtgattggtcagatactggctttgacctcggcattaatagatcaaaaccagctcttagtttaccaattggggagaacagcccggaaaatagaaacggcgtaatttgcgttggaattcccatcattgatccagtcggcattttatgtaaccgattgtttacgaggataaatgattgaccagcttgattatttacaagttcatcgccgagacccaattctttcactaatctagctgcactttcttttcgtgctaagaaagaatccggtccgcgctcaattgtaaacccatcttttcgaacggtttgaatttttccgccaagtttacccgatgcttctataagtaatgtatcaatcggcaagtttttttcatgaatatttttttgtaagttatacattgctgttaatccagtaatacctccgccgacgatcacaacttttttcctcaagcaggctccccctttcttcttacagtacagattcttttttctttaatacaacatctgttaaacaatcaataaatgcgtccgatgcatttggcatttctggacgataatatttcgcaccaatttcatccgttacaactttacactcaaagtcgttgtcatataaaacttctaaatgttccgcaacaaatccaactggtgcatatacgaatgaagtataaccgtgcttttcatttagttctctcgttaaatcttgtacatctggaccaatccaaggatctggtgtgtttcctgcactttgccagcctactgcatagtttgctacttcagctccgcgcgcgatataatccgctgtttcatttaattgatctggatatggatcgcccattgcaataattttctctggtaagctatgtgcagatacgattaatactgctttttcacgctctgcatctgacataccgttatatatacctttcactgcatcaacccagtactggatgaatttcggctctttataccagctatcaatgccgtgaattgttaagtttccaagtttctcagcttcttcttgtgctcgtccaacgtatgatttcacgctaaacgtagaatagtgaggtgcaagaacaagtgcgattgcatcttgtattccgtcgttatgcatatctttcaccgcatcttcaataaacggttcaatatgttttaaaccaagatacatatggtactctacttcatcttgtacttcatttaaacgctgttctaacttcttagcttgctctaatgtaatagtagctaaaggagaaataccaccaattgcacggtaacgctctgttaaatcttccagcatttcaggacttggctttcttcctctacgaatatgtgtatagtaacgttcaatatcttcttctttatatggcgttccgtatgccattacaagcaaaccaattttctttttcatacagcaattctcctttacttcgctaactgccctttagagtattcatgaataaatgtagttaaacgttttaatgtatccggatttacttctgggaatacaccgtgacctaagttaaagatataacccggctgtttcatcccttgatctaaaataccttttacatgttcttcaataacagaccatggtgcaagtaagaatgaagggtccatattaccttgtaccgccttatgaacgccacgtgcacgtgcttcttcaatcggtaagcgccagtctaagccgactacatcaagcggtaagtcgtgccactcattcactaagtgtgcagctcctacgccgtgcataatcatcggtacacccatcttacgaacttctgcaaaaatacgctccattgctggtttaataaatacgcgataatctgctacatttactgttccaacccaagaatcgaaaatttgaactgcttttgctcctgcgtttatttgcgcttttaaatatgtaataaccatatctgctagtttatccattaaagcaaaccaagcttttggctctgcatacatgaacgctttcgtattatggtagttacgagatggaccgccttcaatcatatagctcgctaatgtaaatggagctcctgaaaaaccgattaacggtacgtctaacatttctgtcgttaataaacgaattgtatctagtatgtacggtacgtcatcttctggattgatttcccctagtttttctacgtcttgtaaagaacggattggattatcaataactgggccaatacctgatttaatttctacatccacaccaattgcaggtagtggtgacataatatctttataaagaattgctgcgtctacgttatattgatcaaccggcaattttgtaacgtaagcacataactctggattatgtgtaatttcaaataaagaatacttttctttaatctttctatattccggctgtgaacgacctgcttgacgcatataccatgctggtacataatcggtacgttcccccctacatgcttttaaaaatgtctcatttatagttcttaccaagacccttgctcccttccttaccaatgcttcgaatacgttcgatatttatctttttttactatacagcttgtaaaaacaaaatgcataatattatgtacgttgttcattaaattgacacaaacattcttaaaaacgcttactattttcacaacattcttattataacacagagaaaaactatggtttagctacttttgacttttctccttcacgattcgtttgtgtattatatggtacaacgtaaaagctcggttttgaaaatatgttaacgaacttttcctcatattccccagcaccatttacagtgctaacatgtgtatgaattccgttctccactctatagattcggtacataattctgttatctggaagtggtttccaacttaattttgctttaaataaaccgaaagggctaaatgatagtttcatttttacatcttcaattttgcgcagtcgaatcggagcgccgattgtttccacaccttcaggcttcataaacttctctttatgttctacattagccttcgttaaaattttcttaaacaattttgtcgcagatgcactttctccttgcaactgatgctccttatccgtacggtcataaccaatccaaacagcgcctactaagttaggtgtatagccgacgaaccacatatctcttgctcccttatcgtcatttggcaatgaagttgtacctgtttttccagctagcgcaccgttatatacaccaactctcgctgtcccttccttcacaactccttctagcattttcgtcatataccatgctgtctgcttcgagaagattttcgtctctacttttggagattccccaatgactgcaccgtgtctatttaatactttatcaataacgtgcggctcaattatatttccatttgctaaaaatgaacgatacatttttacaagatcaaatgttgaaacgccattttttagtcccccaagagctgtacttaaaccagcatctgcaatatggacatttcctttttctaaatattgctttccttcttctacccctaactcatttaatagagaaactgccggtacgtttgccgactctaaaatcgcatcatacatcgtcatttcttttgaatactcatgattataatttcgaggttcatacccttcaaaagaatttctttcatttgttaataaagaatacggattatactttttcgtttctagtgctggtgcataaacgataagtggttttaaaacagatccgggctgccttttggcaaaaacacgattaaatcctctcgggacgtactttcttcccccaatcgccgctttaatccctcccgtacgattatccattaataagaaagcaccttgcgccccttcttctttcccaggaaaattccttgcatcttgaaactggttatatgctaccttttgaatcttttcatccataggtacgacaaacgtatatcctccgcgaagtacttcttgatgagacaacccgtataaacgagcggcttcatctatgaccatatcaatatacggcatatatgcaagctcattctcatctaaatttttatatagagcaattgtcttcccttgataacgaacgctttcttctgcagtcaaatagccttgtttatgcataagtgacaatactagatcgcggcgttccttactcttctctgcagaatagtacggtgaatatccgtttggtgacttcggaaggcctgcaagcattgccccttcctctactgttaaatcctcaacatttttattaaaatacaactttgctgccgcttgaataccgtaagccccatgaccaaaataaatatgattcatatacatttcaagaatttgttgcttcgtatatttttgctctaattgaagagaaattgcgacttccttcaatttgcgcgtaaatgttttttcacgagttaaaaagacgtttttagcgagttgctgcgtaatggtactaccgccctctaccttctctctagctaacgtatctttataaagagcacggaatatcgacggataatcaatcccttgatgctcataaaaacgagaatcttccaccgcaacaaacgcctgctgcacatacttcggaatttgctcgatcggtacaaggtctctattttctacgtataatttcgtaatttctttccctttctggtcaacgatacgtgatgaagagtggaaaacgagctgcttttcatccatcatatagccaccagctaacacgataagtttatagagtacaatcgctactacgaacgttgcgacgccgcctaataaagtccactttactttcttcatacatcgtccttctttccaaatgatggtacatttattatttgaaaaagaagtatctttatgtatataatcttcgaagttttttaagagagttgatataatagaaacaaactagtaagggggcattaaaatgaaggctattatttcatacgaaacacctctagaacaagcacatttcactgcaaaaaatgatgaggaaaatatgttttataaagaaaatacagaagaatctgtagaaggttcacttcagtatgacgtactagatgctgtcggtgaattcaaaggacaacctggctatatcgtttgtaacaacatttctgtaacagacgaaggtcgccctgtatttgaaaaccgctttaaaaaccgcgcaggccttatcgaaaacgaaccaggattccaagcgatccgtgttctacgcccattaagtaacgatacatatgtcatcttaacgatgtgggaaacagagcaaaactttaaagactggacagaatcacgttcattcgaaaacgctcataaaaaacgtcccacgcaagtagaaggaaaacctcaggctcaagcgcatccacatgcagaacagcaaaagagtattttctctcgcccttcttttgtgactacttttgatgtgttagtttaatttttttgagtttggagttcggaaaccacggtatgtgaaattatatcggcgatttttcgaatatatcggcgcaactcgaattatatcagcgtttttctgaatatatcagcgcaactcgaattatatcagcgtttcttcgaatatatcgacttatcgacaaatcatgacacaaaaaggaaacaccattacacaccggtgtttcctttttctttgtaccaattatatatacgaagtgaatctttttttctcatatgctttacttcataaccccgcccagctaccgctacaagagttgtacataattcatcctttctttgaaaatacgattgattataacctactgcttgaacatgtcttcttcgcattattcctgtatatttcgaaaaattacgatatacaaccgttagttgattttctcttaattcataaccaccacttttatatctagcatacgcaagtaacgaaaacacgataaataacggtaaaataaaaaataaagcaatatattgtttcaaatatatactcacgctagcaattagaactgtgagtatgatacttattaaccagctcataatgaaataacgacgcaacgctgtttttggtaagtgagcgatctccgcctcaatttcataaggtaactctaaatatgtgagcaggtgctgtacatcttttttcttcataaaaggatgcaacatcacttcattacttgctgctccaatactgtgaattgcttccacttcaacagcgcaataaccaaatggctggcgaagcatacattcttttacagtaatcgcttgaattcggtgcaattttaagacaaattctttcttttcaaataacccttgaacgatacgaatttcttccccttttcgctcaattttaaagtttgcatatttcaacacatatccagccgtggaaataatccatgaaattgccattaaaattaatgctattacaattagtttataaacaccgtttcccatcacatacgcttctactttacttgtgaatccttcaggaagaacaaaatcaaactttgtgtaaagaagtaccagtccagaaaacactagtccgaaccgaccagatgtaatcgctgctgctaaaacctctttcgctgttaactgataaaccgtcttgctttcttcctcttctatttcttcttttacagtagtttctttcttatgtaataaagagattaaatgttttgcctcgtcttctttaataccagccaacatcacttctggttcactaccaccacccgctacttctatatttaacttcataagcccaagcatctgataaatgacgttagaagacgtactaacattttgcacacgttctttatttaaataactttccttctttacaaaaacaccgtgctttatatgtaaaatattattctcaatccagtacactttaaaataccatttaattgctgaaaaaatagccatgatgaataaaacaaccagaaggaaaagataaaataaataccaaggttccacttgttcatcaggtttaaataaaacaagaataataagtggcaacaaactcgcaactctaatacctaacaatatcgtaatcggatgttgcctcttatacatccttatcactcactttcgcaagttctccaatttgtctttttagctgttctgcttcttctttcgttaaacctggaatactatgagaagttgcggctgttgaaatgtgtaattctgctaaattatactttctcatgatcggcccttgctcaatcgttacgtgctgcacacggatcatcggaataagtacgcgttttacaacgaacattcccttttgaatctcaatctcttcttcatttaatctgtaactataatagcgctgacgtaaatttggaaacacaaaataatcaagtggaataaatgtaatagctcctgttactaatagtccaaacaaccagccccaccagttaaagttaatcataaaaaagaaatacgcaattacgactgttagtataactgccgtcccaattaaagcgtgaattcgccacactttcagcatattagaatgaatctccctttctaacggctgcatctcatcactccaattctatgaatttattacttatatattatcaaaaaataagatttcatatacatttttgtaaatttatagtcaaataaaaatatatgaatcaaaagcagattaaagaaaaacatacctcagttttgaaaattatatattataaatatgaattatattgaactaaaataaaccttacatgattcatgtaaggtttatcgttttatacacaatatatttcattattgttgagatatactagcatcgctttcaattcgcttttctttttggctcagttttttatctttagatttttttaatgttaaagtcataccaataaaaataaaaagaattcctgttatttgcattaaagttggacggaatccagtaagtacagtatctaataatattgccactgccggatccaaaaaaactaatattgagattgtttttgtagataaatagcgtaaactatcaaaaaacagataatatactatccctgtgtgaataaaaccagtagctataatatatgtccaattactttgagtgaggccactaaaagcatctaaatctataaatggtattaaaagaaatatccccaagaatgtttgtaaaaatgtcattgcatacgcactcattttgttaatccctttaccaaataaagttgtaaatgcataaaagagagctgcaagaaatccccatatcatacctgaagacattaatgaaccgacagagaaacttccatcgataccagcaattaataaagctcctgcaaaacacacaactattgaaatgatagatattaatgttaatttttctttaaagacgatacttccaattaacagtacaattactggtgcaagatgataaaccgagatagcaattgtaactgacatattttcaaaggctttaaataagaaaacccaattaaatactaagaaaaagccacatattaaaacttgaataacttcttttcgttcccatttatcttgtttatattgccctgtaagcaaccagcatacacttaaaaatattgtcgcaaaaatacaccttacaaacactaattcaaacgaaggtaagtttgtttgaactgaaaaaaatccaactgatccaaagataaccattgatgctatcatctttaaagccggtaccgttttctcttgcttaaaacttttttgaagcaaattaatccccctccaataaaaactcggtttatagtgagaaaaacaccagcctaaaaaaggacaggtgcttttcctcaaaaacactcaattataaatttttcccagcagtccaaccaccatcaattacaaaattagaaccagtaataaagcgggcctgatcagaaatcaagtactcaatacatgaaacaatatcctgcggcaacccccaagtatctaaagattgattactttttatcatagacatcaaggctgtattactaaagtattcttctgtaagttcagttctaataacaccgggagaaatgctattcacccttatattttgctttccaaattccatagccatctgtttagtcaatccgattaaagcatgctttgatgcaacataagcagctcgctctggttcagccattaatccagaaaccgatgctatattcacaatacaaccttttattttcgattcacaccatcgcttagctacttccctagaaaggataaatggggctactaaatttacatcaattacttttttaaacatatcatcggataaatgtaaaacaggtgttatctctcgaataccagctgcatttattaatatatcaggagaaagcttttctaaatctaattgagtaaacagattatgaatcgcttcgctattacttaaatcaatttgcactactttcaaaggcatatctgttttcatataatctattaagttattattattaatatcaagcgctattacatgaaatgatttttctaaaaagtattttatacaagcatgacctataccgctattggctccagaaatcataattattttattctctctcattttgtctccttataagaaaatgttactaataaaatatcacgaaaagcctccgtactacattctgttccaagtggcgttacggcatggaagaccttttgtccaaatactaaagtttctaaaggctccttcaaacttataaactgattaatttcccgaggagaattagctattaaattatctccaccaatagctgtattacttaaattcataaggtgtaaaaacactactggttcatcatctttatgtaaccaaataggtgaactaaaagatggtctttctttagtagctttatatcttacttgatgtaaacctataattaagtctttacttgtatctattatatttgttttaaatgcaaattcagtatcgaagcgcacgatattttgaattaaaggattacataaaaagctatcatttatgctattgaactgtctaactttcccgccatcgtcatagttatattctttagattggaagtaatcattactattatctaaaatataatctggtgaatcaacatactttatataccttgaataagatctagcacgacattcaccgtatgcatcatcttccaaattataataatctaactgtgcttgtgttaatagacgatgattctcttcctcttgtaaaaagatttcatttgaaatttcaaggaatcctttagattcaaattcatgtaccttttcttctatgctaaagccactcattttactaagaacaaacgtcattataaaaacctccacactattgtatttttctatctcaccctatgttagaaatgcaataagtaaccgagattcttgcttaataaaattaaaaattatgatattcaattaatacaccaaatgaaatatacgtaattcattaaaattatttattaagcaatattatatatcctttcgggtattttttctaattatctgaagatttatcaacattagtcttaatattcaaaaataaagaaatagatttttcagaaagataaaactgcgcgtattgcaattatttatgtatataactttttttaaaattatattttaaatatagctagttttttataaattttttgatataattacatacgggaaaagggaagaactttgtcttcccttgtgtttttatttgcatctagtacttttgctagatgctttttttatgctaaaaaaggtatcctcaaatactttgaggataccttttcacctttattatctctgctgttttctacctaatatgagtaatccaaaactcatcattacaagaagtgctcccatatatggttccacaggcattttctgccctgtcttcggtaattctttttcaggtttctctggattcggtgtcccaggcttttctggatctggtgtcccaggtttttctggattcggtgttccaggcttttctggattcggtgttccaggtttctccggattcggtgttccaggtttctccggattcggtgttccaggtttctccggattcggtgttccaggtttctccggattcggtgttccaggtttctccggattcggtgttccaggtttctccggattcggtgttccaggtttttctggatctggtgttccaggtttttctggatctggtgttccaggtttttctggatctggtgtttctgggcctggtggcgctaaatgattcaatttgtttaatacttctaattgaactgcatttatcattccatttgtaatttcaaatggaattggattagttaatttttcatatccttttggtgcttctacttctactagtgtgtagttacctacagatagatctgtgatttttgcctttccatctttatctgttgttactttcactactacttttcccttttcatcatgaacctcaaacacagctcctgataagacttccttgctttcagcggccatttttataatctccactgaacctttgtctaactgttcattctctactttcaatgataagacttttgtcataccttttgtaatttcgaatgatactggttccgttaactttttgtaacctggtaagctcttcgtctctactaatttgtattttcctactgatagatctgaaacgtttgcttttccttctttatccgtcgttactttcgcaactacttttccttttgagtcacgtacttcaaatacaacattttctaatggtgctttactgtctttatctatttttgtgatttctacattccccgtatctaccatttcattttctacagtgaacgctaaagattttgtcataccttttgtaatttcaaatggtacaggcttttctaattttttgtagcctggtaaactctctacttctactagcttgtactttcctactgataaatctgaaactgttgcttttccagctttatctgtcgttactttcgttactaccttgcctttgtcgtcttgtacttcaaagactacacctgctaacggtgccttattatctttatctatttttgtaatttctacatttcccgtatctaccatttcattttctatgtttaatgatagaacttctgtcataccttttgtaatttcaaacgatactggttctgttaattgtttgtaacctggtaaactttctttctctactaatttgtactttcctacagataagtctgagatttttactttaccatttttatctgtttttacttctgttactactttgcctttgtcgtcttgtacttcgaagactacgccttctaatactttttgactatctttatctacttttgtgatttctactgaacctttgtctaactgttcattctctacttttaatgataagacttctgtcataccctttttaatttcgaatgatactggctctgttagttttttgtagcctggtaagctctctttctctactaatttgtactttcctacagataagtctgagatttttgctttaccatttttatctgtttttacttccgttactacttttccttgttcgtcttgcacttcgaagactacgtcttctaatactttttgactatctttatccacttttgtgatttctactgagcctttgtctactagttcattctctacttttagtgataagacttctgtcataccttttttgatttcaaatgatactggtttcgctagttttttatatcctggtaagctctctacctctactagcttatattttcctactgataaatcagcaatctttgcttttccttctttatctgtcgttacttttgttactactttgcctttttcatcttgtacttcgaagactacgccttctaatactttttgactatctttatctacttttgtgatttctactgaacctttgtctaactgttcattctctacttttaatgataagacttctgtcataccctttttaatttcgaatgatactggctctgttagttttttgtaacctggtaagctttttttctctactaatttgtactttcctacagataagtctgagatttttgctttcccttctttatctgtcgttacttctgttactactttgccttgttcgtcttgtacttcgaagactacacttgctaatgctttttgactatctttatctacttttgttacttccacatttcccttgtctaacatttcgttttctactgttaaagcaagagattttgtcatgcctttttcaatttggaaagtaatcggatctactaattgtttatatccttttggtgcttttacttctactaacttgtatgtgccgactgataaattagtaacttgtgcttgtccttttttatctgtcgttattttagcgactacttgtcctgcttcatcttgaatttcaaagactgcatcagctaaagcatctttattttctttatctacttttgtaatttctacatttcctgtatccactaattcattttctacagtcaattgtaatgctgttactctacccttttcaatttcgaatgaaattggcttttctagtggtttgtatcctgccggtgtttctacttctactaactcatactttccaatagataaatctgaaacgtttgcttttccttctttatccgtcgttacttttgcaactacttttccttttaaatcacgtacttcaaatacaacattttctaatggagctttactatctttatctatttttgttatctctacattccctgtatccaccatttcattttctactttcaatgatagaacctcggtcatgccttttttgatttcaaatgatattggtttttctaattttttataaccaggtaaactttctacctctactaattcatactttcctacaagtaaatctgaaacatttgcttttccatctttatctgtcgttacttttgtaacttcattacccttttcatcttggacgatgaatgttactcccgctaacggtgctttattatctttatctatctttgttatctctatatttcccgtatctaccatttcattttctatttttaatgatagaacttcggtcatgccttttttgatttcaaatgatactggatctgttagtttcttatagcctggtaaactttctttctctactaatttgtactttcctactaatagatctgagatttttgctttaccatctttatctgtttttacttcctttactactgttccagcttcatcttgcacttcaaaaactacgccttttaatgcttttttgctgtctttatctatttttgtaatttctactgaacctttatctaactgttcattttctactttcaacgataggactgttgtcataccttttttaatttcgaatgatactgaatctgttagctttttgtagcctggtaaacttttcgtctctactaatttgtacttccctactgataaatcagagatttttgctttaccatctttatctgtttttacttctgttactactttttcttgctcatcttgcacttcgaagactacgccttctaatactttttgactatctttatctatttttgtaatttctactgagcctttgtctaactgctcgttttctacttttattgctaaagcttttgtcatacctttttttatttcaaatggtactggttctgttagctttttataacctggtaagcttttcgtctctactaatttgtactttcctactgatagatctgaaacatttgcttttccatctttatctgttactacttttcttactacttcatctttctcatcttggacttcaaattcgacacccgctaatactgctccgttttctttgtccacttttgtaatttctatattacctttgtctaccattgcattttccacttgtattgggaatatgccgtcccctgttacacttacttcgaactctgtttcttttaattggtagccttcaggcgctttcgtttcttttaaaatatattttcctagtgctaacggtttagagattgccttaccatctttatctgtaacaatatgttcgactactacaccgtcttttactatatcaaactctgcatttgctaatggtttttcaccattttccgaatcaattttctttatttcaatttgacccttttgcacagtatttttaatttcaattgtttttgtttctccagcttgaagtgtaacctctactgggcttgttaatttttgatatccttctggtgctactgtttcataaactttatacgtcccaggagctaaagtttgaggtactgaaaaacctttttcgtccgttgtcagttttgcaacaacttcatttgcactatttcgaacttcaaattcggcacctttcaaccctttgttcggattctcagaatctattttatgaagcgatactgtaccatcttttggagcttcaggcggtgtaatagttacttcttttgatgttaatgttttatcatcaaaatgtaattccgctttattaggaatcttcttatctacgtaagaagataagtctgcattatttttaattttcgccttgatactaagattaattatctggtcttcatatgacttataatcaaaattctcaccaaacgtaaatgttacttcacttctttgtttatctatatttaacgtccctttagaagtaatatcttggccatttttatcatacacttttgcctctaatacttctaaaacatcttctaaatcatcactaattaccatagatgtgtatttaggaggatcgttcggtatatgtgtaccaacttggtattgaataacttgatccatttgtgttagctgctcattctctacaagcttgtcattctcatcaactatatttttttcaatgctaggtggattattgtcacctgaaccggatcctcccccaccactcacaaatacttgtcctactttttcttcagttttaatatttttaccttctaatttcacagtatttttatgaggttttgcagcaggatttgtaacctttgttttatatcttaaaatatagccttttgaactgtctggaaattcaattgtaaatccagtctttgttgcatttattttaatgttagataaatttgctggcttaatatttgttggtgcataaccatcttcaaatacagcctcttctaatactacgctgtctgtaattaactcatgcccaggtcctaatgtatctgttaatttaagatcttgcatttctgttccagttgcatttacatatacaagccaatcagcaatagacggatcttcttgattataagaaccccatttcaatagattttccgtattgggttgtggcttcggtctctctgtcgtattacttacatttacttctttatttacgatttgaccatcaacgttaaattctaatggaatttctttaacaccatcatatgcttctagaccaaagtagaattctacgaataaagaacctttaatgttgttctttccttctacgtaatcacccatagtacacgttaatagaccctttttcatctcacatgtaccaactgtttttccttcagcatcttttaaaggaaaactcatattcataaggtcttttcgaaactcttttggcatatcaattgtgaattgatctccactttttattttttctttagctgaccacttcacttctactttcataccatctgaggcttgatatggttcagatgtcgtgccatcagtacgggaaatattaatttcgtccactggacttttcatcacagcagcttgaataactggagcccacacattcagcactgaaaataatactagaaaaactaatgaaaccattgaaatatgtcttttagtacttttcatttgcatagttccctcctaaatttttatatttatataacaaaaaaagatcgtccggttgcatcaaaaatgtgcaaccagacgatcttagtaaccaatatgtattaccgtagactctaagctttgcggcctatcctttcgaatagtgtgctaaaaatatcttttattctttttttgtttcattttcctcttaaaccaaatattactataccgtctggacggttataattcaatactctataaaattgttctatttttctaataaaaaaaataattcaccactacattaaagaagcaatggtgaattattttctcattatatagttcgcatattctatttatatgaattactaataagagcttgaatcactttttctcttaactcggggcttagccttccaacccctaaatattccgaataccataatccatctgctgctaatctaataattgttgcacaaactgaatctatctcatcattttctatatttttttgcagttgctgaaatgattgttgtaatggctcaagtaattcaggttttaacatgagtgctgccatcatactgctagacaactcttctgttcttctctcattacttaatctttcctctacaaaagagcgaacccatctccctttcctctctgagtcttccgctactttattgtaaatggccccttcataatcctctacccctcggactatcataccttctattaaagcttctttatttgaaaagtgatacaataatccacctttgcttaaacccgcctcttttgccactgcttctaaagttaatttagcaacccctttacattgtacaatttgagaagcggccgccaaaatcttttgccgcgttatgcttatactcattcctttttaaaaccccatttctactaaatttatataaatacgaatcttatttttaatattgttgattactactaagtattttctttatacaacaaaagcttcattacctttgaatttttagttacttattctattaaaaatttccatatcattcaatatgataacattaaatacacaaagctgactatacatctatacttttgtatttattgaaaatatatccattaataaaatttaccgatttagtccttcttattactttaagacagcagtaattctttcagtactaaataaaaaatgttattactcccattaaattgagtaataacattctacttaacaaattcgctgccaactagcatccttcacatcttcactagtcggttttctaactgatccaataaagtgaaactttatatccgcaacatggacaggtgtatttcattttgtcactccattattaacttgttttcccatatattccgactcacaaagaatgtaacagcacaaatcatagttatccccatgaaaaatgtattagaatcttcatatgtagttggaatgcctaccgttacgaaaacaatactaaaagctaaaaatagatataataataaagatataatatagcttagtttaaatcgtaaaatgatacctctaaacaatagctcaccaagtagacagccacctaaaataataggtactccgaaatacaatgtaaggactcccatttgcgcagtagattgaattatctttccaattatgttcggcgaaaccagctcactatcgtttcccatcctatcatataaatcaagtgctgttgctgaaataaagaaacttaatatagaaaatgaatacggtattaaaaatttgctcactctcattcacctcgcttttttctttacatatattattcattatttcctatcatttttacataaaaaaataaccctctatgataaaacatagagggtagcatttctatataaaaatctataccttatcctgaagtgaatcccgaaaataggacaaatatcaaaacacctaaaccatctgctatctgctccctacattctttagggtagatagtttatatgttttattagaaagtagtgccttcttttttataatattcttttgaaatctcttcataaaatgcggctgatgtcgcgtagaaataaggtgctaaccataagaaaccgattcctacagtaagaatacttaaaatgaaccaacctaagaaacttaagcatagtaaaaagtaatccattttatgtccattcatcatatgacgactctcagtaatcgcttgattcgctgtatattctggatgatcattcaaaataaaatatgtcatagaataagaaaatgatttaataatacctggaataataagaagtaatgtccatagagtcaagtatacatacattagtaaatatgttaaaaacgacttcatcaacttacttccatcgctaaaccatctaaatatatgaccaatgcgagcatcagtcccacgaattgcatttaaaacaagataataggcacctattgttaatggaccaataacaagcattactataatacttactgtaagtgaatcacttgcttcttcccaaccccaaaatatcgagaaaatacctgttgttagcatttcaacagctccaataaggattccaattaataaggttgcccctaccgctagtccccatcttccttttaatgcatcaagtgcttctcttttcaactgacttatcatatataacctcctaatactatttccattttattataccatttatatcaaaaatcccacatattttcctaaaacagaagcatattaccttttttcatacgtattgatacatgtgtgctgtagttgtactaatatatggattaaacgactcttttccctataacaaaaaagcctgcctttcataataggcaagctttctcaagttacatctcatttattttcttcttataccaatcctgcattctctccgcatcttctactctcgtatgctctattttataactagatgatgcactcgaaaacttatacgtacataaatccgcacggcgctggaaatatgattgtgtcttctccattgattggacgtgtcttcttctaataagtcctgtatattttccgacgctacgatagacaagtgtaatttgttctccgttaacactgtagccatttgttttaaatgttgcgtatccaagtgtaaagataaggattgcgagcggtagtaatgcccacatgatgtaatacttttcaaagtatatgcttattccagtaagcgggattgcgagcatagcgaaaaagataaaactatcaatgagatagcggcgcaatgctgcttttggtaacgaagtaatacttgcattcagttcgtatggtaattgtaaatgcgcgagtaattgttgcactcgatcttttcgaatgataggatgcagtgtaactttttcttctttcccttcactttgaatgacttctacttgcacagcacaataaccgaacggttggcgtaaaatgccttcttttatcgtaatcccttgaatgcggtgcaattttagtacgagttcttttctctccagtaacccttgcgaaatacggacttcatcattttttcgattcactgtgaagttaccgtgttttaacgcgtagccaattgtagatatcatccaagaaacgacaagtaaaatagctaccatgtaaatccagccatatatatcgtggtccattacatatgacgtcacactattttttatccatttcggaatatactcatctacttggtgataaacgaaaaagattaaagagaacaatactccaaattgaccagatgtaacagacgctattaaaatctctttccacgttaacttgtactctgtcgtttgtttttcctctgtaacaattgctttttctactgtattttctgctgcttcgtctaacgttttttctgctttcacttctggagttggctcatttagcaaagtaataagctccgtcgcctcttctaccgtaattccagctaagctaacttctgcttcatcgcccccgccagctgtttcaatctgaatttttttcaaaccgagcatttggtatagtacgttagaacttgtattaattgtttgaacacgttctttatttaagtagctctcctttttcacaaagagaccttgtttcacatgtaatacgttattttcgacccagtatactttgtaataccagcctacgatagctgaaataattgtgatcaacgcaaaaccaataggaactaaataccaaaatggaaactttccccttaagctaaaaagaaaaataatgagtggtataaaatctgttatttttaattctaataacatcgtgattggatgctgcctcttatacatcctcatcactcactttcgctaattctgcgattttcgttttcaacatttcagcttcatacatcgttaaacctgggatgctatgagaagttgctgctgttgaaatgtgtaattctgctaatccgtattttctcataattggcccttgttcaatcgtaacgtgctgcacacgaatcatcggtactaatacgcgctttacgacgaaaagaccatgctgaatttcaagttcttcttcatttagttggtagctgtaataacgttgacgtagtttcggaaacgtaaagtaatcaaacggtgtatatacaattgttaatccgatgagcacatagaaaatccaagcccaccaattaaacttaatcataaagaaaagatatgccaaaatgactataatactgattcctagctcaattaaagaacgcgctttccacaccttgaccatgtcagggtgaatttcatttttcaatggatccatgtaaccactccaaatctagtaatctaatatatgaatactctcaatctatattttacgtaactttacagaaaattgaaattcaatcttctttcttctcaggaataaaatatccgaaccaaagtagccaaatgaaaccgattaacttcatccaatttccatccgcttgaaaagcttcaatcatacctggtattttataaaccccaataaatccaagaaaaccgagccaccagtttttttgcattttcatctttactcctccttcattacgtttttcacatttcgaatccaaatttctttatactttaactggaatcccatgagcatatagttgctcatattatcaatcacgagtgctagcgtatgagcattttcttccgtttcatgttgtgacactacgtcaagttctacgcctttcttcaataaatcgtggaaaccatttaagaaatcttcttgtatttcaaataagcgtttctgatacttttcatttcgcgatgcagttacgagaaattcattgataacgcgtaatatcccttcttgcccttcatattcagagagcatatgtaaaccatcagcaattaacttttctgcaaagttttctttcgtatattgctctttatcgaaataactcacgaaatgatatccagagaaaatttcttcaaataaaaaatcgattaacgcttctttagaagaaaaatgataataaatagccggttttgaaatacctacctctttcgcaatcatggaaagactcatcttctcaatgccgtgttctgccataagtttaaatgaagcctctacaatgttttgcgatgtttgtaaattcttcgtcatactgtacctcacttatttttacttaccggtcggtaagtaaattataaaacaaaacgaaatgattttcaatttagttagcactacagaaggtgtttatcagaaaatacagaaagttataaagtaaaagcaacatataacaataaggaggatatcatatggggcttggtggtaatggcggtagtggtggtaatggcggcggtgaagcaggacaaactggtaagagcggattttcattaatcattgtactttttatcgtattgattatagttggagttagctatatcggacttggcttctaagaaaaggcgtcctacgttacacatgtaggacgccttctttttaatccctattcagcaatcgcatacgataacaattcatcgtcacttctccgagtctttgcagtagttgatagttcgcatatgcgcctaccggggcaccgattattggtacgagctgcagcattttggctaaatcgatatagtctcggtactctgtttggaacttttcccagtccatatgattttcttcttctgtatcccacgtttcgattgctttccatatttcttttcggtgatcgtcacttgaaaaggcaagctgaaaaacatgaaggataaaaaggcgctcttctttgttgctcgtatcaaatccgtacaatgtcgctgcatcgaataaaaatttaattttaatgccgagtaaaagcggaaagtcagcaagaccgaggagaataccgccagcccccgtccctgccccttctgccgctgctatttttttatactcatccatttttttacgaacttcatcgtcacgtctttgcagtgaccatgtcgtctcttttagcttcggctttataaagtttgacccggcgctgattgtttgcaccatcatacgaatcgtctctgttaataccttttgtactttcgccggaatgagctgttgcaccttcgtctgcactttctttgagaaccgtgtcatcatagaagaatctttcataaatgtagctttccactgctccagttcttttataaccttttcttcatatgtaatcataggttcattcccttcaatttaaacgctcaatgcgcttcgccccgtattggtaaacgaaaccgatactaaataatatgcttacgataagtaaaattcctgtcatcatgaaatctttcgttgctagtgcaaatataactgtaaagattacgctcccgatgattagaatcgcgtttaataaagtaagaaaatctttcttcttctcttctccccctaccggatacaaatcaagccaaatcttcatgcggtgatgtttccataaagttaagagctgataaccgattaagtataggaaaataaggcttacgataaatcgtccatataaaaacggaatgaagtacaaaataactcctccaagagcgagcaaacgcacatataatccaaaatagttacctgatcttaaaaacgttctcgtatataagtataaatatgtacgcttttcaccaatcatcgaaagaatgaaatcgagccattttctgcgtgctactctttcttttaatgctggtacatcaacgaacatgttcgcgatgcggtacagcagcatcatcttcttaccttcttcagaaattaaatactcccagtttagcggctttcccttcaccatttgatgcagtactacgaggtataacaccatgagaaggacgattccaccaataaacataacggaagtacgctctaaaaggaaataaacaaataagccgtttaaaataaaacgaatgaaccaatcagctctttgtatattttgatctgttaaaaatgacttttcccatgctacgaataagttccacgcttttacgatgacaaacgcgagtacaatccatatgtaagccgctcctgtttgtttcatttgctggaagtataacggagcaagcgctgccgctacaattgcgattatgtacaactgaatcataaacgtaaaaagaaacgcctttgtaaagtatggttttaatttttgttcaactggcagcaagtaaacgagatccgcttcttttaataacgtttgaatggatccagccgttaacacgagtccaattaatactgccattacgagcgccgccggaaacgaaggtgttaacgtttgtaaccattgctggtaataatacgctcccgcaccaatgatgaacacgaaaataaatttcaaatgatcattaaatacgtatttactatatgtacgaacttcttttagaaagtgacgaaatcgttctttccataacgctgtgctattcataatcttcttcctttgttagcgcgatgtaaatatcatctaacgttgcacctggcatattaaactgtgattgcagttcagatagcgttcccttcgctcttacttcaccttgatgcaaaataatgaacgaatcacaataacgctctgccgtcgctaaaatatgtgtgctcattaaaataccggcaccactctttttcatttggtccatcatttgaagaagggattgaatcgctaacggatctaatccaacgaaaggttcatctactatgtaaagagatggctccactaaaaatgcgctcataatcattactttttgtttcattccttttgagaaatgagatggaaaccattttaaacgatttttcatacgaaactcttgtagtagttgtcctacacgttcttcatattgtttttcatcaatgccatacgccatagctgttaatttcaaatgctcttctaacgttaattcatcatataatactggcgtttccggaatgaatgaaaagctagaacggtacgctgtcatatcatcacgaattgttttcccattaattgtgacagttccttttttcggttccattaaaccgataatatgtttaatcgtcgtacttttaccagctccatttaaaccgattaagccgacaagttcgcctttattaacagagaacgaaacgtcttttaatacaggtcgtttcgtatatcctcctgtaacattttctacacgcaataactcgctcatacgacaccactttcttcattagtattcattctatattcatcttaccaaaaattatgctgtactacatagtatccatgtactcaaaaaaattttttaaatttattagcatatatttttccgaaagcggacatcataattattgaagaaggaacacattgaaaaagcaaccaccaattgatgagtacaacaacatagtgaagtcatcatgaaatggggtgtccaagttggacaatgaaatttacacataaccagatcatttgtttcattttcgaaacggggtgtctctgaaagagcatatactgttttaaaaaataaacaatttcattttaaaaaagattgcaattcatttcacttgaaaatggggtgtctacggcagaaactttagccgatttaccgtgcatttcttaaataaatgaggtgtctgcgaaacgtaaattacgataatgctttttcaatccctcttcagaaaacaggaagctgagtcagcttcctgtttttcgtgtttgttctcttatataattatggtaaaatacggctaaggatatttgaaaggatgagatcaatgaatcatacagcagacaattgtattttttgtaaaatcattgacgggcaaatcccttgctcaaaagtatacgaagatgaacatgtgcttgcatttttagatattagtcaagtaacaaaaggacatactcttgttattccaaaagttcacaaacaagacatttttgcgttaacgccagaaatcgcatcacacattttttctgtcgttccaaaaatcgcaaatgcgattaaagcagagtttaatccaattggctttaacctacttaacaataacggtgaaaaagctggacaaactgtgttccacttccaccttcatttaattccacgctacggtgaaaaagatggtttcggtgctgtttggaaatcacaccaaaatgaatacactatggaaaatttacaaaacatcgcaagtacaattgcaaatagtgtgaaataatgacactataagaaggcgtaatacataacaagccagttccctgaagtcatcaaattccgcatggcttgtttctttacttaaaatgctcagggatgattgtttgtgcatagcacatataagaaagatatgcatatttttcccatcatgaatacgaacaaaaaataaggaggtctccttttatgtcaaaagctaaatcctttattacaggtgttatttgcggcggagcagttgctggactagctgttcttttctcaactccttcttctggtaaagacatgcgcggcaagttaaaagaaaaaggaaatgatattaaaaagactttagctgatattacagctgatacgaaattattaaagcgtcaaattattgaaactgcttcagaaggtaaagaagtgtttcaagaattaaaagatgacatgcaagacacgctttctaactggaagcaagatatttctcaaaacaagcgccatattgagaaagaaattttggacatccaaaagtcaattgagaaactacaagaagctgttccagaaaaagcgtaaacaaattcctgcttagttttttgcatataacaaatattttttatataaattgaccttgacacggcatatcatatagatatgccgtgtttttatgcatttacaatatatgttatcacttaacatgtaaggacaacgtatgtattcacgactcataaaacgcttccatagttatgcatgatttgtatagaatgtcatttttccgaaaaattttcacaattctcacaaaaagactttattaatttttattttactggcataatagatagtaatgaaaaaagaatgttaaagtgggtgagtaaatgaaaagtggagaaaaagattactcggtaaaagaagcgatgattttcagccaacgcattgctcaattatcgaaagcgttatggaaatgtgtagagaaagattggcagcagtggattaaaccttacgatttaaatattaatgaacatcatattttaacaatcgcttatcatttaaaaggggcttctatttctgagattgctaagtttggagttatgcacgtatcaacagcgtttaacttctcgaaaaagctggaagaacgcggctatcttgtattctcgaaaaaggaagatgataaacgaaatacgtacattgaaattacagacaaaggggaagaattactacttcgcttaatggaagagtatgatcctgaaaataattcagtgtttaatggggctcttgcacttcgtaatttttatgggaagttcccagaaaatatcgaactgattgcaatcctgcgtaacatttacggacaagactttatcgatatttttgagaaatcattagaagatattgaagagaactttacagaatccgatcaaaagttagttaagaaataatctatttattttttcgcaatcatgcttaagaattcattcataagcggcttaaataaaccttgttttgctagcgcttccgcagtttcgtgtacttcgagctgatgtggaagcgctttttcaaattgatctaacagcgcatcgaacaaaagaagcccttctgctttctccactacatattgatcgttcagtttttcacaaagatttagtatacgttcaatatcttttttacgagcttttttctttatgatcaaagaataaaatggacacttctcttcatcaatcattttaaataataagtctacatagtattcagcttgttctaatcttctaacaacgtccattttctccctcactttctaacacaaagtcttctatttctgaattttgtaacacgaacaaaatatcgtgtgatacaatatatgtatatgtattttagccaaaaggaggtctcgcctcatgacacttataacagttgtttttgtcgcattcgcacttcttgttatattttacacgaatttcatgacacatacactgtgtgaacgaaaacaaatagctgcgagccgccagcccggtgtctttcgggttattaatgtatgtataacaattttattaatttctagttatatagaaattatatttcatggaaagtgaggaaggaaagccccttcctcacttttttcctctataagcaaattatacctacaataaccaataaaataaacagtacaagtaataaaataagttgagaattcatccccatcccctcctctattctgtatatgcggcatacgcccaatatggcacactttcaaaatctgacacgtactggttaatttttctttatcaatatgaaaatgcgtcgaaatatgatatattaaattttgtacatattgcttatactatagaacaaaacattcatcaaaactttatcctcagccacggtaagccctgttaagcgcgctttaccaatataaaaaagcaaaagtatcagtgagacttaatcgggctcttatgaatgaaaattcatcggtgtaggataaattaaaaatacataatagtaggagtgtttatcgaatgaagaaagctatgcttgccttagccgcaacaagtgtaatcgcattatcagcatgtggaacatcatcatcagacaaaattgttacatctaaagctggtgacattacaaaagaagaattctacgaacaaatgaaaaattcacaaactggtaaacaaacactaaataacatggttatggaaaaagtacttattaaaaactacaaagttgaagacaaagatgtagacaaaaagttcgatgaaatgaaaaaacaatacggtgatcaattcgatacactaatgaaacaacaaggtattaaagaagaaactattaaaaatagtgtgcgcgctcaattagctcaagaaaaagcggttgaacaatcgattactgataaagatttaaaagcaaaattcgaggattataaaaaagaaattaaagcaagtcatatccttgtaaaagatgaagaaactgctaaaaaggtgaaagatgaacttgctcaaggtaaatctttcgaagaattagcaaaacaatactctgaagatacaggctcaaaagaaaaaggtggcgacttaggattcttcggaccaggaaaaatggtaaaagaatttgaagaagcagctcaaaagttgaaaaaaggtgaagtaagcgaacctgtaaaaacacaatttggttaccatattattaaagtaactgataatcacgcagatgcaactttcgataaagcaaaagctgatattaaaaaagcactagttcaagaaaaaacacaagatgctcaatttatgaacgatcttatgatgaaagaaatcaaaaaagctgacgtaaaagttgacgataaagatttaaaagatcttttcaaagagcaaaaagctgacgataaaaaagacgaaaagaaataatgaagtaaaaagcttgggcttaggcccgagctttttttatctcctcttctctcagtagttaatctagattcggtaaatgaaattatatcggcgatttttcaaatatatcgaccgcaactccaattatatcggcgattttcaaaatatatcagcgcaactccaattatatcagcgattttcgaaatatatcgacttaccgacaaaaaacgacaacaagcgtgactccctcttcaaacacaaaaaaaccttgatccacgccacgtagaaccaaggtttatcttattatcattgattaaatgaaaaaactatgttaaattagaacagaaacacgttttacaaaacaaaaggaacgtatttatccgtatcttaattgtacaccaaaacacatcttcagtcaacctctatttttcacttttaaaggagtgcttaccgtatgaacaaaaaacttgatctagagcaaaaaagattggataccgtaattgaaacaattacggagcaaattgataaactggaaaacgaaactggcagacgccgagcagaagtaatcaatattcgtaaacacttttgggatgatgtgaaagtgaatactgatactttcgatgattatcttgaaacagttatcaacttaagacaacaagctcagtcactagctgtcacacaaattacccataagcacacctttaatcgacttgccgcattaagacgcatgcataaagcaccttatttcggacgaattgatttcaaagaagaaggagaatctgccgcggatcaaatttatatcggcgtcgctacacttactgatgcaagcggagaaaacttccttatatatgactggcgcgcacctatttcgagtgtgtactacgattatccaccaggaccggctgaatacagtacaccaggcggcgtaatccacggtaatgtggagaaaaaattacaatacattattcaaaatggcgagattgattctatgttcgatacgagccttacaattggtgatgaaatcttgcagcaagcgctcggaaaagggacgaataaacatatgcagagcatcgttgctacaattcagcgcgagcaaaatgaaattattcgtcacgatgaaggccgactccttatcgtgcaaggagctgctggtagtggtaaaacgtcagctgccctgcaacgaatcgcctacttactatataaatatcgcgaatggttaaaagcagatcaaattattctcttctcccctaactctatgttcaacagctatgtttctaacgtactacctgaactcggcgaagaaaatatgcagcaagtgactttccaagaatatttaaaccatagactaagtaagtcatttgacgttgaagatccttatgaacaattagaatatatgttaactgaaacgaataatcctacctataaaacgagaaatgcgagcattcgatttaaggcatctactcaatttttcgagatgattagagcgtacagacaatctcttgaatcttcaggcatgctatttagaggaatgaaatttagagggaaactgattgtttctgcgaaagaaattacagaacaattttacaataccgactcctccctccgcttccatagtcgaattgagaagttaacggattggctaaacaagcaaatagatgcacttgaaaaagcagaactgaaaaagccttgggtagaagaagaaattgaattacttagtaaagatgaataccaaaaagcttataaatatttacagaaaaaaggcgagtttgacgacaactcctttaatgattttgaaaaagaaacgagagtacttggacgtatgattgtccgtaaaaaattgaagccactgcgtaaaggcgttcaaacattacgctttatcaatttcacaggcatatataaacaacttttcacagatgcatcatgggttactgagaaaaaaccgaaagagtgggatgacatttgctccttaacagtaaacatgcttgatgaaggaaaactatattacgaggatgcgactccattcttacttttaaaagaattaattgaaggcttccaaacgaacagatcgattaaacacgtactcgtagacgaagcgcaagattattcgccgtttcagttcgagtttttaaaacgtctcttccctgctgcaagaatgactgtactcggagactttaaccaagcgatatttgctcatgcgagtgaaacggttaatttcgatacacttacaaatttatacggtccagacgaaacaaacggcattaacttaactcgtagctaccgctcaacaaaaccgattattgaatttacacgtgctctcgtaccggaaggcaagaacattcacgcctttgaacgtgacggcgagaaacctacagtgacgaaagtatcgaatgtcaacgaactgcacgaacgtattactgccaaagttgctgaactacaaaaagagcagcacaatacgatcgcaattatatgtaaatctgcagctgaaagcgcagctgcatacgaagcacttaatcatatcgataatattaaactcgtgaagagtaactcagccgagtatgagcaagggattgtcgtaatccctgcttacttagcgaaaggtattgaatttgatgctgttattatttacaatgcttctaaagatgtgtacagcgatgagagcgttcgtagattgttctacactgcttgcacacgcgcaatgcatgaattgcaactttatagcgttggcgaggttagtccttttatacttggagctgattcggagagttttgagcttataatgaaaacaccttgataatcatcaaggtgtttttctcattctaaaaggaatatctttacgtcgatatacactcagcacaatccccattataaatgcatgaaacagagttggtatcaagccgtaactaataaagggtaatgatatagaaacacgtggtaatatcccaagaatcatgccaacgttataaacgaaatggaatacaaaaagagttactccaccaacgaggagtaatttaccataaccatcatttattttataagctatattcattattcttactgcaaaaagagacaaaatcaagacaagaactagcgcaagcacatatccataatagtaagtcaaacttgcaaatacaaaatcagtatgagtagcagggatagactttatatttccatatgtaccaaaccaacctgccgatgccattgcctcttttaaacgtaaataccattgatcatgctctgggtttaaaaaccctaaaattctagctatccggtattcttttacagcagaccaggaaaatagatctctaataataagaagaaaaattggtaacattgtaatgagccatgctgttttctttcctatcttactccaccaaagcataacgaataccatcgtcatatagatgaaaattggcaccataatcgatgtcgttaaaaatagatataaagaaaataaatacaacatgaaaagatgtataaactttaatctactgttattaaaaaaagaagcccaggctagaaaaaagaatggtatcgtcattaaacagtcaattttgatgggaccaattttcattaacgcttccccatttatagaaatagtcggaaaacattttatagctaacaagataagtattccaattgtataaaacagccatccaaacctctctagcttccggtaatcaagcaacatcatcccaatggctgttgcaatcccaagaattacaaaaattactttgttcattagtaaatcatccgtatgcccaaaagcgattattggtaaaaaacctaatcccatagcagctactaataaaataagtaaaaaccaatccacctttggcttatgaagtttattaagttcttgccctagtttaatcggacttcccatttgttccaccgctttattttcagcgacttcctcgctcaaacctttttctatccatgtgttcttcgcctgttttaggtgaaaatctagttccgttgctacaaaatctttcgcttcttttgatttaatataattcgtaacttcgcttacaaaacgctccccttttttattcaatttctcctcactcctgtactaagccttttaatataaattgtaccttcgtagcatttttttctgcctttcgcagcatctttctccctttatcgtttaattgataatatttcgctcctgcatgatcccagctagattggatcaaacggttctgttccagacgatgtaatacggtatataaaaacccttcatttccttcgaatttccgaatccctctccctcgtagtagctgtgacaattcgtaccctgttttttcattactgaggagttgtaaaatcgctaaagagatgtcctcttccttctcgtttgaagcattgattttttcgcgcacctgctttcgatgttgatcagaaaaactcaaatgtttaaacgttgtattctccattgattttcgcagaccttttaattgatcttccatttgattattcctccaatcctttcttcaaaagctccttcgcttttttcagtctcgtttttatcgtattttcctttacgtctattactatagcaatctctttaattgataactcttcataataaaatagataaatgacttctcgatattttatcggtaaattcattactgcagaagccagttcacggtcctccgcattttgaatgacagtttgttcgacactaccattttgaacccccatataagcagcttcatcctctgtcacgatcaccttgttgttataccaactttttatatagtccttacattgattaatcgcaattctccataaccacgttttcacattcgacttccctttatatgtatgcagaaatttatagcatttcacaaatatatcttgcgttacatcctcagcaatctctttattgtttacatatgaatacacaagctgcaggacttcttgtccatacttgttcataatttcatcgataaggagttccttatcttctatttcaaacgcttctaccgttaattcatccacatcatttcctccttcccatatattagacgacgcactgtatgaaaaagttttataaatacataaaaaaatacggatggtaatgtccataccgtttttttatgaatatttatttacttcttttcccctgacactaatgctctgcttaaaaacaggaattttcatccatatatcttgttccctattttaaaacataatacaattaaaatgtaacttaataagctataactagtaggtgtggcaatcatctcttccattttgaaaaaggggggaggtgataatataatcgcgatgtttataattaaattagtgtatggtatcctaaccggagctggcgttgtcatcggtagaagatacgtcggtccgtggctaatttctgtatacaaaaaagcgagaaccaccctgcttcgtggaaaaggtaagggcggttctcggctaaaacgttaatgtaattgtcttataaccgcacctactaccaccacaatagcaagttaggttacacaaggcagaagtttctcaggcttctgtcttttttattttatgcaaaattcacactacatactctatcatcattgtaacacattttatttatttttagtcaagagaaaaaccacctaaagggctccccttcaggtggttctctattttacgctaacgcagctagactttttcaagttcagctgtgccgctctcatcatttatagcaccaataaagacggattatgtacccgcttcataacagtatgagtaaacaaggaacaacacctattacgaatataaaaaatcctctcactatatagcacctatgttttcagcaatactctattaccatcaaactaaatttgtataatttaaactacagaatagcaagctaattttcaaatatcttcttgcgcattatcctaaatttattatctatttgtatcatgcttataaataaaagatatcctaccgacgcaccgagcatatttatagcaatccgccacacatcaaaaacatcagacaaagttagtaaatgtaatatctcccaaacaagaaaggtcataacataccacttacgagctttcttatagttagaagaatattccataaaaaaagaaccacctcaaggctccccttcaggtagttctctattttacgctaacgcagctgcttgctcttgttgatctacaggaattacagcatctgttaatgctttttctaattctgctgtgtatttcatttgctcttctttgctccagcctagtttcgcagccatgtagttgattactgcttctttccactcgtatacccagtggatattgaagaatacagtgcctctgcggcgtacgaagaagtcaactggttttgctgtcatttcgtaatccattgcgtatacaagagggattagaacgtcaagcggcatgttgtattctttcgcttcgtctttatgttttttcgctaagtcaaatagtacgtcaacgttagagccgtagaatttcgcgaattcttctgcttgtgctgttgttaaaccatatttcgtaccttcgccagcttttttcgcaacaaatgctgggaatccgtgtgaaccatctacatgtccaccagagattggcatatgtttcgtgtcgctcttcggatatgcgctatgaccttctttttgtagtaagttcgttacgtagtctactaccatttcagccattttgcggtatcctgttaatttaccacctgcgattgtaattaaaccagattcagaagtccaaatttcgtctttacgagaaatttcagatgcactcttaccttcttcgtaaattaacggacgtacaccagcccagcttgactcgatgtctttttccgtaatttttacgcttgggaacatgtagttaatcgcattaatgatgtatgtgcgatcttctgttgtcatttgtggtacagctgcgtctttatcgtagaacgtatctgttgtacctacataagtttttccgccgcgaggaatcgcgaataccatacgtttatctggtgtatcgaagtaaatcgcttggcctaatgggaaacgtttttgatcaattactaagtgaacaccttttgataactgaagtacttttccttttttcgagttatctttttcacgaagtgtatctacccaaggacctgctgcgtttacaattttcttaccgtaaacttcatatacttcaccgtctagtaaatcgattacacgtacaccacatacttttccatctttatataagaaaccatctacttttgcgtagttaacagcttttgcaccgcgttcaattgcttctttcattacttcaattgtaagacgcgcatcgtctgtacgatattctacgtagtaaccgccgccttttaatccttctttttttacaagaggctctttcttcagcgtttcttcacggttaaacatttttctgcgctcgcttcgttttacacctgctaagaagtcgtatacacgaagaccaattgatgtactaaatgatccaaacgtaccgcctgtatggaatggaagtaacatccactctggtgttgttacatggggaccgttctcatatacgatcgcacgctctttacctacttctgctaccattttcacttcaagttgttttaaataacgtagaccaccgtgtacaagtttcgttgaacgacttgatgtacctgctgcaaagtcctgcatttcaaacacaattgttgataacccgcgtgttgctccatctaatgcaataccagaaccagtaatacctccaccaattacgatcacatctaactcttgtttatttactccgtttaatacgtctttacgttgtttacttgaaaatttcatggtaattcctccctttgataacgaaaaaagagaccacaaactccgctatagatttcgcctctatagcgcgttgtggtctctccaaatctcctaccgaattattaacttgtcaccattataacactgtttatgattatttgaaagcttttgttgcttcaattgcttttttccatccagcatatagctcttcgcttgttttcgcttccatcgttggttcaaagcgtttgtccatatgccactgttctttaatttcatcttggtttttccaatatccaaccgcaagaccagctaagtatgctgcacctagagccgttgtttcgttgatcactggacgctctacaggaacatctaaaatatcactttggaacttcattaagaagttatttttaactgctccgccatcaacgcgtaatgttttcagttcaatacctgaatctgcttccattgcgcataatacatctttcgtttggtaagctaaagattctagcgttgcgcgaatgaagtgctctttcgtcgtaccgcgtgttacaccaaacatagcgccgcgtacttcactatcccaataaggtgttcctagtccaacgaatgctggtacaacgtatacaccatcagttgattcaacgcgactcgcatacacttcactctcacttgcatctttaaacatgcgcattccgtcacgtaaccactgaattgcagaacccgctacgaaaatacttccttctaatgcgtagtttactttaccatctattccccatgcaattgttgttaatagaccgtgctcagaagctactgctttttcacctgtgttcattaacatgaagcaaccagttccgtaagtatttttcgccataccttcaccgaaacaagcttgtccaaataatgctgcttgttggtcaccagctacacctgcaatcggtacattttgaccgaagaagtggtaatcaattgtttctccgtaaatttcagatgatggacgtacttctggaagcatgctctttggtactgttaacatttctagaagctcatcatcccactgtaagtcgtgaatattaaacattaacgtacgtgatgcgtttgaataatctgttacgtgtgctttaccaccagatagtttccatacaagccacgaatcaattgttccgaataatagatcgccgttttctgctttctctcttgcaccttcaacgttatctaaaatccattttactttcgtaccagagaagtatgcatcaattaaaagacctgttttttcgcgaaccatttcgctataacctttttcttttaactcatcacaaatttcagctgtttggcgagattgccatacaattgcgttgtaaattggtttactagttgttttatcccagacaaccgttgtttcacgttggttcgtaataccgataccagcgatttgttctggttttacatctgcttcgcttaagcaagttgcgataactgctaaaatagatccccaaatttcttgcgcattatgctctacccagcccggctttggaaaatgttgtgtaaactctttttgagctgaatgaacaatttcaccttttttattgaataaaattgcgcgtgagcttgttgttccttggtctaatgaaagaatatattttttcatatcggtttcccccttatgctacttttctactatttgtattgcttccgctttttttacttgtcatataagagattgctagtacaatcacagttgcgataatcacataaataagtgctgaattttgttttccttcaaatacaacttgatggaataaacctgcaagtgatccacctaaaattggaccaactactggaatccatgcatacttccagtttgaaccgccttttcctgcaatcggaaggaagaagtgtgcgatacgcggacccaaatcacgcgctgggttaattgcgtatcctgttgtcccgcctaatgataaaccaatacttacaattaagaaacctacgataaatggatttaatccatctgcaaatttatttgcaccaattgctaatataccaaatactaaaacgaatgttccaatcatttcacttaaaaggtttgcaaatgtgttcggaattgctggacctgttgcaaatacacctaactttgttcctggatcttctgtttctttccagtgtggtaagtaatgtaaatatacgataactgccccgataattgccccaatcatttgtgctgcgatataaccaggtacgtcactccatgggaacgctcccttaaatgctaatcctattgttaaagctggattcaaatgtgccccactaattgatccaaccgcatatgctgcaaccgctaccgctaagccccagcccattgtaattacaatccaaccagaatctttcgcaaacgacttctttaaacttacaccagcacaaacgccgccaccaagtacgattaacaacgcagtccctattaactctcctaaaaatgctgacatagtatccctccacaatcaatttaaacgcttccaaatgtgatagaggtaaaatgaatggccattcgtttttgtcaaaagaaaaagacccacagcttgcacgcttctatataaatttatatagaaacaatgaaatgtggatctctacttttctccgtcacgtttattaacttgtctataatgttaaccgtaaatgaaagcggtgtcaacgaaaaaattcacattttcgtcactttttttggtaatgtttccatagttcgcgttttgatgtcgtaattgctgtcgcaccagcgtttaaagctctttccacatcttctacagtacgaataaaaccacctgctaaaatcggtacaccagtacgctctttcacttcagcgataacgtccgttaatgctccaggaagtacctcaatataatccggtttcgtcttatctaaaagattgcagctcttctccatcgcactcgaatcgattaaaaagatgcgttgtattgccacaacacctttttgcttcgccttcataataacgctcgcctttgttgaaagtaacccgtacggtctaaactcctgacataaatattccgtcgcatgcccatcactctgcaaaccatgaattaaatccacatgtaaaaacacctttttacaatattgcttcgcaagcgatataacactcttcaattggccgacatgaatatctaaaataacaatatattcatacgaactatgtaatagcttttccaaatctttaatttgcctcactgccggcaaaatcttctgttcatgaaattccattctctatatccccttctttatgtcatcctatcctttatagtacacaatttaagtgaaaagaacagccagtgtaggggatttctttcaaatctttcctctatctatatattttcttcaacttatccgatcccataccacctataatcatgaatgcaaggggtaaaagattcattacatatggtgcatctgctacaattgtaatacttgctccagcaaacttatttagcatccatacaacgatttttgcaataaacaaaaatactcctatcataaatagactatcaaaaaacaccttccattttggatacgccaattgcttactatcttcaattactttctgcgtcaattcttcatcaccccttagcagttcatcaattgtaataccgaacagatcacttaaatgaataataatttcaatgctcagatagttctttcccgtctcccatttcgaaacagattgcctgctcacatgaattttttcagccaaatcattttgcgaccaatttcttttttccctttcttcttttaaacgctcactaaaaatcatactgtgtttatcacctctctatgcccattatgttcaaataaatgatgaagagtaaagctagttatcgttgcatttcctgcgcaacttatgcgttacagcttataatggcgctcttttatatgtatcttccctatactatgctccaataataatttcccgaacaataatacaaggaacggatactaataaagtgaaactttaatcaaccctcaccaatcgggcttttacggacagcccgcccccccacctaacttctttgcttccgctgaattttgaggtggggtcttactgcccggcaaatagcgggataaagactagattaggcataaaaaatacgccatcccttcttatcagtctccagaaagaataacgcaaattttcatttttactcatcatttttcggactatatgaaaaccccggatatttcacaacaggcctcttctccttacgcagggaatccattacttgcgggccaacatgtatattactctccactatttctttaggagtcagtgccatccattgatttaacgatacatcttcaaaacgattacttctgaacatctctaaaaaccataatgtttcggtacctgtattttgaatataatgccccgtcgcaaacggtacatatccgacatcgccagctctataatcaaatgtacgagcggtaccatttccaagaaacacagtcattctcgcttcccctgtcaaataatattgccattcatcattattcgggtgccaatgaagttctctcattccgccaggctcaacctcaacgagcgctgctgcgattgttttggaaatagggaaatttgtagaatctacaattcgaacgctaccaccaggcgtcttaatcggattttgttttaacaattcatgtttaaatgttaaaggaacttctcctttcggtgattgaatttcctgactttcaagcgaacctggcacctctccttgataaatataaacttgatctgaagggatagaacgaaaagcactctcaggtactccgaaattagccgacaacacttcttttggcgtatgcgcaaaccaatcagaaatagctaaagtagataaatcagaaaaatgcccatcatcgaaaacgagtagaaattcacaatgttccaatccttgaatggaatgtggaataccaggcggaaaataccaaagatcacctggtccaacatcagcaataaaattccgtccattttgatcaacagccgttatgcgtgcccgtcctaaaagcatatacgcccattccgcttctttatgccaatgtagttctcgtactccaccggccgttaaactcatatttactcccgcaatcgtcgtcgaaaccggtagttctcgaacagtaatctcccgagaccacccgccttgtttcaaaatcatagaagtgtccgagaatgaaaacttcaagttaggaactaatcctgcatccgttataggcggaacaagcatattcggattttgaatatcccgcataacattacgaggtccagaatcaatcgtacctgctccgtcgctgcggattggttgtggcacattccctcccgcttcattaacagtacgtttcttcatgattacactcctttttcatccaattagtaagtaaaaagcctccatcatagtgtatgaattgggctttggatggttacagttactatggagttacatcatctgcctatcattatcgttttgttcatttctcaacttatactagtatgcttagcgcttaggaagacaaaaaaataaactagaactaacaaaaaaccctgtaaaatttattacagagtttttcaccaattatttattgttttacatatcgaatacgaacattatcgtccatttgataaatttgtaatgtgtttccataactaattcctaactcttcacttacaccaactgcacttacaaatacccctttaaatactttatttttagttggttttactaccgatactcttcgctgcctcttcaaacagtttcgaaccttcttgtgctttacttactgattgatgcattttactttcgtcttcctgatctaatgcatcaaagagaagttgaaaacaatccgcatatagttccatcgactgctttatcttcgcctgttctccctgtaactctggaggcgcttgtagattcttcagctttgtagcagttgcctttgctccacctaaactcagttgtacttcacttttcttttgtttgtatgattttacgtctgaatctgctattccttcaattaatttcattgtattttcaatttgagtagcactatttatgatatctgccttgtacctttcaacatctgaaccagttaccttaccagttgaagaactagaagaagttgaattatttgaagaagaacttggttgactacttgatgaactactgtttgtaccttcacctttcgctacagataagctatcctctttcttgccatcagttgacttactctctttttcagaagtcttattctctttctctaccttttgcgtttcttctttctttggttcagctttcttaccatcagtttcaattgtaatacaaccactcaataacataactggtaacgctaaacttactaatttctttgctttcatgattactaatacccctttatttgtaaaatgtagtgcaaacaagttaatatacttaactaataaattccccccgaataatttattaaaatctactatccatagatttcctgtatattcataatctttccatatataagattttacaaagaattacatatttggtcaaagggatttatgtagtttttaaaaggaaatttactaaacgaaaagaaaattttaatcacaaagaaaagaagctaacaataaattgttaacttctcagcttaaggaaaaaatagtatctttccttatcttctactatctagattgtggatgaaccatataccgctccctcaaaagaaaaaagctaccacctaggcaataatttctactaagtggtaacctttcaaaatttctattaaagcaataccgaatctttatcactatcctgattacgtttctcacgctcttcttctaaacgcttcatatatacttcgccttctttttcgataaactcattatccatatcttgctcttttttcgaagtatataaaaccatgtagccacttaatacaatcccaacaattacaagataaacccaccatggtaaagtttccactctacttcattcctttccttagacaagccttattagtttcactctatgaggaaagaagtggatttatgcttaaaatttttattgtggatgcttcgcgaaaaatgcttgtacatattccataaactcaattggttcctgacgaaacggtgcgtggtatcctttttcaataatatgaaacgtactatttgcaaatagcccatgatacagttcaccatttttccacgaaacactcttatcatgtcgtccccatataattaaagtcggtgccttaattttatcagcttacgaaaatgcggcgctctcgcattttcgtaagctgatcataatgctctttatcatcacgactattttttacttcatttttattatacttcgtaatctcagttacagtttgtaagtccgtcgatagcggtggtacttcataactttctttttgctggaaagactctatccctttagcatccgccaagatgagatgcgtcactgcatccggatataaatacgctaaattgagagacatctctccgcccatcgaatgaccaagtactgcgaattgatcatacccgagcttcttcattaacttataatataaattaacttgcgcaggaaacgaatactgaaaatcaactggcttagaagaacgtccaaaccctaaaatatcaaccgctataatcgtgtgatctcgtacaagttccggataaatatcactaaacccatcagaagaaccaccaaacccatgcaacatgagtaacggaggtttcccctcaccaatttgcttaaaataaatcgtctgcccatcaatttgcgccatactctctttcgtattcagcttcatcataacagtatctttcacttcttcaaccttcgcaatcggcttatcaacgaagttacatacgataagcaaaacaagcacaataccgctaatcaaataaaacttaaaccgtttcaaagttcccgtctcctttcttgagttgctatttaaagtttttacattttttggttattttatgttctctttttaattgtaactaaaacagttacaattatactaaaaaaatataactcacttctattactaatggttattctgtaactattatagttacatatttaaagtaagtcaattcttttctctacatggcctgaaaatagaaaaagggacttcatgttgaagtccctttctttgttattatagttggcttactccgccgtcgcctttattatctgctggtgctccgcctgtgtcaccaatgttaacgtagtctggtcttgctggtgctccgccaccatctcctttattaagtgcaactgaattaaaatcatgaaatcctagagataaagtaaatgcgaaccctattaccgttaatacaatttttctcattattttaacgctccttttatcatttgtttttttcttgcttctttactcatatgataatattcgctagatttttcatgattgttttcataataaaatttatctgctaagcgttccgtatactcttgaatacaatcaaataattcttctttttcaaaataagaaatcgcatctaaaataacattttcaaattcaccagtagtcgcattcattttatttaaaatcatgaatcggtattgatactcttgattttttaactgattacaaatacgtaaccctttatttattaacgactctgctttttctaattcatttagttttaggtattcgtctgattccaagtatagtgctcgaaaatgattaggagatttctttgttacttctgataagtgacggatagctaactcagataaattttgattcgcgtacaataaacctaaattatttctaaccattaatatatatttttcatgattaacttgttggaaaacattcaatgctgtattaaatgtttcttcagcgaactcgaattgttgtaaatcaatataacacaaccctaacatattctcgcacaacgcaagattaatctcataacctggttgttttaaaaaaaactcttttgctgtttttatttgatcaatcgctaacatttgttgatatgattggttataaagatatccataacgataatgaaactccgcatgttctatcggatcggcaatatatttcaataacttctcagcttgctcatactgttctttcgcttcattataatttgaaattaatgtgcaatgaaaccctttaaaaaagtgatagtaataagctagaacaccttctgccgggatttcaaaagattctactttatcaaaactatcttctctaaccccaatccaatcaactaatgcaccatatctaaaattcaacaacgcatgataaagcaatacatcctgatccacgtccaacccactaatcttactttcaatctcctctttcatttccgtggccttctctatattttgctgcaacattacacgataccaatcatctaaagaatgtttcatttgctcccgcgttactacatctgctcccatacactcgcatccccttttctccaaaattacaaaattaggatttttatacaattattaaaattgtatattaccactccttttctatgcattgaaaaataattatcagaaaatttaatattttaattaattacaccaaagttttcctttttaataacttgagaaataattgtcagaaaacttactaggataaataaaaaagcaagtagttccagcactccgctaaaactacttgctctcctacttactatctctatttttactctttaataaattccttcgtacttctcactgtatcaattggacgaactaatttttcaatttcttcacgttttggctctaggaatggaggtaaagataatttttcgccaagtgtttcgtatggctcatctcccataaatcctgggccgtctgttgcaaattcaaataagatttgtggtgcaactcttgtgtataatgattcgaagaagtgacggtttacatagccagatgaaggaagtccaacgctactgattctctcaatccattcttctaatacagcgcgatcttctacgcggaatgccgcatggtgcactgtaccaaaaccttgttgtgcttcaggaagaactgtattatgttctacaatgacagaagcaccgtttccacctttattcacttcaaataaatagaattctccttcttgcgcaacctctttaaataataaaactttttctagcacttctttgaagaaactaaagtttgcaatacggatgaatacagggcctaaaccagtaattgcatattctaatggaactggtccgttttgccatggtgtacctgattctataccgttatcaagctcatctgaaattaattgatattgttggtcatcaaagtcaacgaaagaaagagttttcttaccaaattgctctttaattcctgtatgttctacttccaaacggtcaaagcgtttcacccaatacgctagtgctgcatcagtcggaacacggaatgaagtttttgaaatttcattcgtaccgtgtacacctttcggaacacctgggaaatcaaagaatgtcatatctgttcctgcactacctttatcatctgcaaagaataaatgatacgtttgaatatcatcttggtttactgttttcttaactaaacgcattcctaaaacgtgagtgaaaaactcatagttcttttctgcactacttgtaatcgctgtaacgtggtgaattccttttaattggttcattttatattcctccaatgttttttaatttatattttctctcctattacttctcttcaataggtgctaaattcgcttcaatctctgcacgctgatcttctaagaacggtggtaaatcaagtttttctcctaaatgttccacatctccatcaactgtaaatcctggtccatctgtcgcaatttcaaaaaggattccgtttgattcacggaaatataagcttttaaagtagaaacggtcgatgattcctgaagaatggaagcctctttgtttcacctgttcttcccaataagcaagctctgcatcgtttttcacgcgaattgctaaatggtgaatgctaccgcggcccggtttttcagtaggaccatctaaatatttcacaacgatttctccaaaagcctctcctttaatggactggaaaattgcttcttgatcatttcggctaacctctgtataaccgaacatctctgtaagtgtactcgccattttatcaagtctacgaactgtcatttctacagaacccattccttgaatttgatgctttgtaggaacttctgatttctcccaagtttcccagtgctctactttttctccgtttgaaacgagtaatactaagcgaagaccttcagcatcctcaaattgcaaagcaggacgatttgcatatgttgttatttcactatgtttcacatcaaatttctcaaatcgttctttccagtaatgtaagctatcctctgaaggaacgagcaatccaattcgagtaattgcatttgtaccgcgatatgttcttcctactaaaggaatttcaaaaaatgataattccgtacctggacttcctgttttatctccataaaataagtggtacattgacggatcatcttgatttactgtcattttcacacgacgtaagccaagcacatttttataaaagtgattattttcatttgcatttttcgtaaccattgaaatgtgatgatgccctttaattttatacatttgtaattcctccacttcgttttactagtcaagtgatgataaaaaaataatatgttttttagctgttcaatttattctcattatgtttttgtaaattcatcttggtttttactgcataagttactttcgtttttaactcgaaaacaactgagtgtatgtttttcatatgactcaatcgctttcgttactatcactttacaactcaagtgattaaaaagcaagtaatttatctcaaattcgagatatttttttattaaataacattttggactaaaaacacgagaaattcttggtttgaggacattataaaattcataagttgatggatgtgagatatcgccagcatttttgaaaaaaacacgctaagagtatgcgagattttatacagttttttcgttaatccaataacagacaagaaccctaaaaccgcaccagaataggaatgtataaaaaattgcatagattgatagaacaaaaaaaggaggttcccttgtgagagtagggttcctcctttttccttgctaccgataataggacgttatgttaactgatcatgtataggatattcatataggaattgtttctatcaatgctgaattatacaaagaaggaggcatgataatgaaaaaagaacaattaatattaattgctagtcttactcttttatttcctgtccttgaatttttcttccagaaatatgattacttcaatttttacgcacatataggtattatagccattgctgtatcaactgtcgtattcacactccattatataaaacaaatttattggaaattatcgatcgtatgaggaaattatgaaagaatagaatttaattgaatatgttttctattacccgtttcaagcttttccccataccttttactgcccatactagtttaaggaacactttaaagatagcatcccatacgtgttcattaataaaaaattcgtatactttctttaaccactctttcggggatttactcttacgtttaaacctttgccaatgcgtttcttcactagttttcataactaccccttctttcttaatcgaatatgctttctattagaagttttaacacctcgctataatgatgaaaagaacgaggtttatcatatctggcaatttaatcactcctaattttaaattaaattcattatataacgatttctaaatttttagttaattactagtgagaattaagcaaaatttaaacaaaaacacctatgttaggctttagttagaggttttccccctataaaatcaactatttgcgccaccaactatggggtacgcgaattactttgatattatctttgaacgaacaaaataactcctttcgaaaaacaaatgaactgatattaatcaacttccaatatcgagaattatgtaaataagctgcccatatggacagcttattgtattttttgcttaacatattttttctgaaatgctggcggtactcaatttaaaagttgatatgcccccattctagtggcaagatatgttttattagttcttcgttacacccatgcgtacttcttaactattttatttcatttttaataaagtgaaactttaatcagtgggggttttcttcaccccccactgattatcagccctcaccaatcggactttaatgacttaacattatgcttatcttaggagcaaggtattttatcggtgagtgtatacaaaccatgtaatgcttgctgttaataatgctgacgaaatcaaagctgtaagaacactatatgtttgccacataagtattgttgaccaatcgaaagcgcagcacagtatacccagagcaatcgtagcgatcaggaaaataactgttacggttattctcttttttgtcattggctgtcgctcattcgttctccttctgcgtaatcctaagagaaatagcaaaacggccaataggcaaaaaataattgtgatagacgacaaaatgatatccaaaagctgtgtgccgcttatttcatatgactgagttagattgccttctaatatatctttaacttttagtaccatgtttgtattggtatttgtgccgttgctcagcaaggagacggctgttcgttcatttggcagtatgactacttcggttctgaaatttggattgcccccagtgtgttctataatcgtttgttcggcatttacggaccaacctgccgcataatacataccgttgacagccgaaacagacatatcaccctatgtgatttttcgataaccgtgtgaaatatttcgggtatgtcctgcacgatacccatctgtatgcccatccaacgagccatatcttttgtattagaaatgatgtagcctgcgggtttattcccagcataatccggagctttaaatggagttgtcataaaaaaggaagaacggtagccctgtgccaactgtccagtagcttgagcatcttctttataaacatacgtctggtgaagacctagcggctgaaatacctgttccttcataaagtcttcatagctttgtcgcgacacaatctcaataaccaaacccaatacgtcataattaacggttccatagttatactgttcaccgggagggaacgccaattcagcatcaacgagcatttccacagtcttttgcaacatatccggtgtattgccttgtggaatattttgaagatgcctaatatttgttagaccactggtatggtgaagaaagttatttagtgtaagactttgcatatcaacaggtttcccttgatactttaatgtaaaccaaggtaaatatttttggacagggtcagtcattgagagcagcccttgctcttccaatagcataatacccataccggtaaaagctttactgaccgaggctaactcatagagtgtattttcacttgcagacacccccttttcacggtctgcataccctgaagaaaagtagaacacttcatcatcagcaagtattgagattgacattcccggcacacctgatatacgacaggcatcatctagcaacgcttgtattgccgcagattgcgaatctgacaacgcataactttgtgttgcgaatcctgagaataatataaatatcgttaatacaaaaacaataatctttttcataaactctcccttttggaaaattataagagaataatataaataacctccttttacaactacgaaactaatttttaatgtatctttctattcacctatataatatcaaataattgcgaatagttacacttgaacgaacagatggatgtaatttgaaacaactttaaagagccttgctacgtagaatgtagtaaggctcttagctttttaataatcaaaattcaataactttattatcattatacaacagccccactaagcgtattaacacttaatgaggccactttattcacactattaattatggaacgtcggtttatagaacgaacgattatcaagtgcaaagacacgctctgtgtattcgcctggttttgtgcgtcctaatgcgcggtccatcatgttcatttttgcatctaagttatcgatgtaatgcagaatttctgcttcttttactaatggtggttttgggctaccccattccgcttttccgtggtgagaaaggacgatgtgttgaagaattaatacttcttctgcatcgatttgcaattcgtctgctgctttaccaatttcgttcaccataatagaaatgtggcctagtaaatttccttctaacgtatacgttgtagaaattgggccagatagttcgattactttaccaaggtcatgtaaaataacgcctgcatatagtaagtctttatctaacgatgggtatagatttgagatagctttcgctaaatcaagcattgatacgacgtgataagctagtccagatacgaactcgtgatggttctttgtcgctgctggatagtctaaaaattcgttttgatgcttatttaataaatgtcttgttagacgctgaatgttcgggtttctcatttcaaatatgtattgcgtaattttctcaaccatatcttcttttttcactggtgctttttctacgaagtctgagatatctgttacttcattttcattcgcaacacgaatttgtttcacacgtaattgaatacgtcctttgtagtttaaaatatcaccagctactttcacgattgtttccgctacatattgtttctcaacttctggtgatacgtcccatagcttcgcttcaatgtctccacttggatcttgtaagattactgttaaaaatggctttccattgcttgcgataccttttgtcgctgttttaattaacaagaaaatatcgacttgttcaccaacttcatactctgcaattttctttttcattcgaattcctccaccaaatcagttacttttagtatagcacactacaactcattttctttacgcatatgtgttaattttataatctgtttttctggaaaatacgcaagtaaatgcgcatgacatgtaaagaatatgacttgtctatcctttgcaatttcctttataagttcaatcgttcgattcgtccttaccgcatcaaaatgcacgaaactatcatcaataataaatggataatcatgttcgaatgttttcgcgagcgcaaatctcagcgataaatataactgctccgctgtcgcttggcttagttcatgactgtaaaaacgcataccatcgttacgttcaacgataaacggttctgcctctgacggtgaaaagattttactatagcgtccgcctgttaaatagacgaaatactcttctgatttttgtaaaatacgaggaagatgaacttcatgataatagtgcttcgttttcgttaacactgtctttgcggccgcataagcagcccacttcttcacttgttcacgcacttgcgcttttttcatttcccattcatgcattaaatcgccgtacgtactaccttcttctaaattcgcaatttccatacgatgtttcgcaatacgctctgtcagttctttctctttcgtaagacagttttggacagttgtaatttcttgctttaattttccttcataaccgtcagcttcataatgttcagctaatgataaactcgttaaacgttgttctaacagatcaatttgcggcaataaacgccccacttgcttctctgcatcctcacgtttttccgctaatttacctgcttctaaaaacacctcttcatctatagactctgcaatatgccataaaccatctcgttctattagtaattgctttaattgttcttgcataaactcatattcttcttgccattccgccagtttttcttttaactgcttacaagtttggcgcttctctttctcattttgcatacggctttgtgcctcgtgtagcttactatactccgcactaccgataacagtttctagtttatgttcaaattgcgaaatcatttcatataatgaagattttcgcgtaccttgcttctctaactcccgatataattgctgcattttttcaatacgctcaaacgccggcaagatgtgtgcatacgtataaaattcaggaaacatatagcgcgttttatatgcatcgacttgttctcccgcctggaacgtttctctctcccattcctcatacgatgaaacgactttatcatacgctcgttccaattgctgtaacttataagactcgcgctcaaataacttccgaatctcttcatctttttctaactgatagcgaacagacatcgcttcttcactttgtctcccgccagcactttgctgaagtgtaaggagctcttcttgtaatccacttgatggatctttatataaaacaagggcgagaacaatccctacaaaaacaatgacactaataaataagagcgctcggttatctataaataagcttgtgaataaaacgcctgtgttaataagaagtaaaagaagacaaactctttgccactgctttttcttttgcttagctgctcctgctttctcttcatacttgcgcttcattctctctgcgcccataccgataaacgccgcatcttggaacgatttctctttctcaactaacacatttctctcttcatccgctaacatttgtttcttaatctgccttatattttcttcttgttcttctaattgctcttgcgctactttaaaacgatcatcgagctgtgctttttgcgtttctaattcgcgcgccttttgcactgtttgcgtaattaactctttcgttgccaaactcatatcaaatgaaagaactgtttccttttcaaaagtagcaccaatttgttgttctagttctgcgatttcttcttttatattcgtaatacttcctgtcatatcacgcatttcttggcgtgcattttcgtaagacatatgctgcatacgaagttcttctacataactttctttttgtaaaaactcttcatctatttgaatcgaggcaatttccgattgcactgtctcaattttcttgtggagcgaatcaacttgtaattgaagcggctccatcttcgccttaattgcttcataacgcgccattccgtttacaggaaactgcccgctctcgttctctaacactttctcgtgcgcacgcttttcaataacgagaggctcaagcgctgctaatatttcataatcttgcttccgcttttctgcattctctttttccacgcgaacagaagcaagtttctcttcactttcttttaactgctccacttgcttttcatacgtgccaattttcccttgccactctttcatcttctcttcaagtttcttcatctcttgcaatgacacgttaatttctggtttacgaccactcggcttgaagcgctggtccatttctttttctagctttttatctaactgcaatagcgcatcacttccgactgcacttgccgaaaataaataattgccaatatctgcttcgccaagctgatgaatgttttgaaggccatgcatatcaaatgaaaagacagattcaaataaattttcattcatcccgcttaatatatcgtttaaaatttcttctccgcccgttttcccgtcttcaaaataaacggtcacctcgccagctgccgtctttggcaatcgctcaattttcaaacgaccgtactgctctgtttgcacagtgatcgcaccgccatacttcccgccttctttcggctcataacggcgctgtcctctcgtcggaaaaccgaataaaatacttttcataaatgagcgaattgtcgatttccccgcttcattttcaccgtataacactgtcagcaaggaaagatccatttccacattttctaattttccgtacccataaatatggagtttttcaattctcattttttatccctctcttgctggaataattgttctaaaataatattttctgcttccttttgaatctctttcttctcttcttctgtaaaagattcaatactattacgcgctacaggagatgtccaaatagtgcgcaatactccgtccatattagtgaaagcttctaactcctttagcacactaccgacgaaatgattttccgctttcaaacgttcgatttccgcaaaagaaaccgtctcatttttccacttcattgcatatacgaaatcttttcgctcttctccagatgctaaaatgtgaaaaatctcttccacacgcttttcgtcgcgcaaataaggtgaaagtgggccttgtcctgtaaatacgacagttaatagcgtaccttcctcttctcttcggcattcattcatcgcagtagatatgcttgtcataagttcatcaacagtgtcaagtccatcaataccaacctcgatttcgtcccatacaacatctgccgtatggaaaaatgaacactgcgatccttttttcgtaagttcaataaggtatgcacccttctcgcctgtttccttacgatgacgaccttgtatgttccctggataaataatgtatggttcttctgataaaatttcacgtttatgtatatggccaagagcccaataatcaaactgtttttctttcaactcacgaatttgaaacggtgcatagcgattatgctctgcatctccttccacactaccgtgaagcataccaatatgaaaaggcgcatcactcattttcgtatactgcgctgtcatattatccgttaccgcttgctgcaaataactaaacccgtaaatagaagctaacaattcaccatttttataaaatgatttctcttctacataaggctccgtaaatacatgaacattttctggaaactcaattgctgcccagcttccccctaaatgatcatggttaccgtgaataataaaaacagggatatcgtattgcgaaagtctcttcatttgctcacgcacaaacacttgcgccctcaaacttctcgtctccgcatcatacaaatccccagctagtaatacgaaatcaacgcgctcttgaatcgctttatcaacaatacgctcaaatgattcaaacgtactttgcttcattctctcccaaacagactgggcaacattcatctccatccctttaaacggactatccaaatgcaaatcagccgcatgtataaactttacttgtttcacaaataacgatcctttctatctttcaaaagtttcatcttatcaaaattaaaatcgctgaaaactaataatcaccgagaataaaaatattctcgatgattaaagtttcattctattttaccacgcaatgtcatatatttctttgcatattgtagcgttttatgtcaaaataattataagattctgattttaaatattggagggaattttcatgggagtatacgttctaacagtctttgaaaaagatggttcaaaagcattagacgaatcattcgaggcggcaactgaaaaagaagcgaaagcaaaaggtgaatctatcttacaagaaaaaggattgtatgaaaaaacacatcgctgtacatctactgcaggtaagctcgttttattccagcgctaaaaaaagaagcgtcatccgcttctttttcactctactatatcttcgtcacaccacgtaaacaccacatctagaatgcgattaccgatacgtacgcgtttatcccatttacctgtttggatctgatgttgcaattctgctttcatcttttccgtccagtcgtgaatcgtttcactaccgtcgtacggatatacgcctggaaactcttcctgcagtaaatgcaagctctctgcatcaaaatgaaaatggaagaagtagtttgctgtaagcgatggttcttgcaatcgtaaaaaatgatcatcaatttgctttctatttcgatagaaagtaaagatattcactttaccgctcgtaatttggtcaatttgaatttcgtgcttctctataatcacgtcttgtccacctcgttgtatactatctttagtatatatgtcttttgcaacaaagttaaccattttcgcgcgaaattcatttccttcattataattcctgtacctccatattcaatcaggataaataaaaacaaagttgaaggggagcgatcacatgtatttcggaagcaaaggttggtatgtaaaagaacttaaaaaattaggtatccgtacttatgaaggtaaaaaactagaatcttatcgtacgcatgtgttgtctagtttacttgagagaatgaagaaggcttcggcttaatagaatagcaagaagtaaacctgaatattggtaaatgataaaaaacacctcctaaattcgcatactaagtatgcaaattaaatggaggtgtttttattagtttcactttttcaggggcgcttcagttttcataaaatattttttgtttccgctgaaacggataagttttaatctcagctgtatctaaattttcatggaataaatgaatagctataatttgtctacaatcgtaagtatggtaataatatgttccagattccatacacattgcactcgtatagatggtattatctaatgttccgtcttctgttattactgaccctttaggaacctcacaatttgataagatatgaaaaatagcagatatcccctcttcttcgttctctataccttgaatgttttgttttccatatgctgcccgcacaaatcttgatggcggggtaaaatctccaggaagtcccatcgttcctgaaccttggccaaaagcacttaatggtacatctccccactccgttggcgcaaatggctgcgatttaagtccaatatattgtcttaaattttgtaaatgccaattaaactccggactattagtcatcactcctaatggattgtcatacatttttagtccatcagttgtcggctcaagtacaatacactctccccatttatctgctaaaatccaatgtagcggcggagtaattcctaaaactggtaatggtatatctataagggaaatgttatcaacagatttttttaactcttcaacagaattaaattgcgtgaggctccaagctacaaaatcaaatggcgctaaattcgttttatggttatctatactgttactataagtagcgaatcccgggaaatagagagtggcacacgtcataccagcttcatttactccgtccgccataatgacccttccttcatgattaattcccattccgacaacagcctttttcgctcggatagtttcaccagttatattgttccactgataacgccgaggaatgattattacttcctgattcatatctaatgtgaaatccattgttctcgcaaaaagatgttggaaatttttagtttgtaacgtcaaactagtacacatgaagaaatccccccattttatagttatatacacattttataaaattctgataaatacgtaaattaaaaaccctatttatcactaacaaagtaaccatccaaactaaaaatgctataataaacccaatcaaactaagggggcaaattactttgcttggaacatgcattcaatttcataagtttggcaatccaaaagacgtattacaagttgaatataaaaatatagaaccactgaaagataatgaagttttcgtccgtatgctagttagaccgattaatccatctgacttaattcccatcacaggagcgtacgctcatagaattcctttacctaacatacctggctatgaaggtgttggtattgtagaaaatgttggcgcttttgtttctcgagagcttatcggtaaacgagtgttacctttacgcggggaaggtacttggcaagaatatgtgaagacatcagctgattttgtagtccctattcctgattccattgatgatttcacagcggcacaaatgtatattaatccccttacggcgtgggttacttgtacagaaacgttaaacttacagcgtaatgacgttttattagtgaatgcttgtgggtccgctattggacatctatttgcgcagttatcccaaattttaaatttccgattaattgccgttacaagaaataataagcatacagaagaattactgcgccttggtgctgcatatgtaattgatacttccactgccccgctttatgaaactgttatggaattaacaaacgggattggtgcggatgctgcgattgattctatcggaggaccggatggaaatgaattagctttttccttacgtccaaacgggcattttttaacgatcggtcttctatcaggaatacaagtgaactgggccgagattgtcacaaaagcaaaagtgcacgcaaacatatttcatttacgacattggaatgatgaagtgtcaccatataaatggcaagaaacgtttcgtcacttaattcgtttagtagaaaatgagcaattacgttttatgaaagtccattctacgtatgaattagcggatgtgaaagcggcagttgatgttgtacagtctgctgagaaaacgaaagggaaagtgtttttgacgagttattgaatgccataaaagaatctcttttagtatctcggcttcaactacctaaaaaataacattgtcaacacaacttaaattggttatcataaaaacgaatataacaggagatgagcagatgaatatgaacgaaaagaaatccttttcaaaagtttctcggcgaaaattagtcgatgaagtattggaacgtctacaagagaaaatcttttctggcgagtatgaagttggtgatcgcctccctacagagccgcaattaatggaagagctaggggtaggacgttcaacgctgcgagagagtataaagatattagtacatgctggcgtattagaagttcgacaaggacaaggcactcgtattgtctcattaaatacaacgcaagattcatttgaaaaaagactgcaagcagctaatataaatcatgtgtatgaagcacgaaatatgttagataaagaagtagcaatgttagcggcacaacgccgaagcgaagaggatcttttatatttaaaaggacatttgaataaaagaaaaaatgcccttcaagaaggaaattatgtagcatacatagatgcagacattcagtttcatctagccattgcaaaggcgagcaaaaacgaagttctatttgatttgtatcaatctttcgtacctgcccttcgccatattttaagtcaattaatattacatacagcgaactatgaagacaactctggcattcatgaaaagttattccaagctattttaaagcaaaataccgaagaggcgcgaacatacgctgttcaaaatttggagctgaaataagctccttatctattacacaaaaacgtcagatgatatactcaataacatctgatgtttaagaaaggagaaaatgaaattgaaacagcaagaacgaacttatttgtatatactagcactattttttgtttccattaatttacgtatcggaattacatctgtttcacctttattagaaacaatccgacaagacttaaatataagcaatttttccgttagttttttaacagctattcctgttttttgtatggggacattcgccttactgactgggaaggtaattaaaaaatacggggcagaaaaatcaattatgacttgtcttattttaatcggcttggcaacatgtatgagagcttttaccttttccatttccacattattcgcgagttctttatttatcggtattggaattgcacttgcaggtcctttactatcaggttttattaaagaaaaattccctacaaaaattggcttaatgattggcatatattcagtaggtatgggaactggcgcttctttaagtgcaggtttaacaatccctttacaacatgtattaaaaagatcttggaatatggcactcgctttttggggtgcactaactattatcgctattatgttttggtatcctgttatgaaacgaaaaaagaagacgaacacacaaaataaaagaataataaattgcctttaagaaataaaaaagcatggttatttacaatccttttcgggctacaatcaggaatcttttattccattacgacttggcttgcgccggcaaatcaaagtatgggtgtgagtagtaagcaagcaggtactcttataactgtttttaccgtgatccaaatgatatgtagctttttaattccgacattagcggatatttataaaaacagagcactttggttattagggagtatatgctttgtaatcgtaggtttatcgcttatgatttacccactaactacaccatggatcccttctattttactaggtatcgggctcggcggcgtatttccactcgctcttatgctgccgctatatgaaacaaaaacttcagaagatgcaagtgcatggactgctatgatgcaatcaggaggatatattatgggcggattcattcctgtcctagctgggatagctcgtgactattttgatagttatacgcaagtttttattataatggcacttttaagcttaattttactcctattaactttagtcatgaataaaaggagaagaaatgcagaagaccttttctccgcttaaatttaaaatgttaatatatggtataatttaattaaaaaacgaatggagcttctaacatgtggttcatttcggcaatttggcctattatactagtcgggggaattgtagtatttgtaataaaaagattggaacataaatataagcacggcaaattaggtaagaaaaaatcaaaaaacactcaaattttattagacagtttaataccaatggcaatgcttttagggtgtttgatcggtattattgtcggcatattttctcctgattctttactactttcaattagtttaggatccggaataggctatttatttggtttttttgcctatgaattttatagcaagacaggaaacaatttttcctaatccaaaaggaataagcgggacagtacatagtaatcatatgaaatatgtaactgtcctttatttttgcatcaatgttatcaccttacctttcgcctactatacacctcttttattgatttttctctcctcccctttttgcatatccgcttttttattttcattggatctatatccaaagtaaagtagcgcacatgtaataacagaacctacaatgtatcctaaaaaacatcctaaccaaaacataaaaattgcccccaatccattataaattttatgtagtagacatctgtaaaacgttctcggtacctccgttttttattacagattggaaaatccccttaaccattccatccatgaacattctgtcttctctattgtgattattatctataaagttatttataccactaattcttccattatctcaaataacaactttattatttattataaagtttgcactcacactacatatatgtagcatcactgtctctttttcattttacccttgcaactggagtttacttctacaacttaaaaacaaaaaaaaccctcaaagcataaacttcaaggggtgagcctgttttttatttacttatatacgtacagctgtaccacttacagcaaccattaacattccatcacgaacaacttcataatctacgtcaataccaacgatagcgttcgcacctttttgtcgtgcaagttctttcatttcatccattgcaatatcacgtgcgtcttttaatttactttcgtaagcaccagcacgaccaccgacaacatcacgaacggaagcgaataaatctcggacaatgtttgcacccataatcgcttcaccatttacaatatcaatatactcaataatttctttaccttgaattccagaagttgttgttacaatcatgactgacactctcctaataagttgtagttttaattagctttcttatgtctttattatgacatggaaaaagtaactaatctattgaattaccttacaggagtgtgacaattttgtaataataaaatgcgctttatgtttcattttaataaagcgctttaatatttggatacataaacgagtctctattttctttccaatccttttctacttctttaaaagttggtcgccctaattctttattattttcatgtttactaaaccattttttcacatactgatctccatttttattttgaactgtgcaaaggaaactattactactatcctttaatatttttacaatcacgaatagacacctcttcccttctcaatatcataataggacttgatcttttactataagcccttcctctcttatagtcatacgactcctcggccgcgccaaagttgtaagatcaaaaacgatattcactttgtttacattttatttaaagaaatcagagttataggcattatgcttatcaaatattttatagatttctaacttatcatctaattttgcatctactaaaattaatatatttccatcgtaaatatattcttcatactttttagcatggtcttcagggattcctaagccgataaatgctcctattaaacttccagctcctccgccaataccggctcctccaatagctgctgcgattggtcctgctgctacaattggacccattccagatacggcaagtataccaagacctgttaataaaccaccgagcccgcctgctactcctccagctacaagccctgtcgctgaaaagatatctgctttatgtgcagtttcgctattcactttttcacccgatttttcttctagatgttcaatttccttttgatctttcgcaatagctgaaatgttatctgctgaatatcctttatcatttaattcattaataacgagtgctgcatcatcaattgttctaaaaacacctactatttttctatctacattcataactattaacctcctaaagttttatataatgtatttttatttttcttcatttctgtatacactaattttcttattaacataaccatttatgaaaaaagcgaatagtaaaagcactacaagtgaactacttaacaagtaaattaaatcaaatgtaatattaatcatcatttcattcatgtataccaggctcctttttatttaaagtaaaagtatattttgatagactaatctactaaacatagacatcttacaattcatcttcagtcaatctctttgtagtatatgtatacccttcctaaccttttctaaacgtaaaaactataattatattttttcttatttatgtgtttaacattttttaaaacgggtatgtttatattgttatgcttactatatggaaaggaatattacgatgaacgccattcactctactactatttcttataatgaaatacctacaataacgcagattcatcatttttatgctttaatgacaacatttcaaacgaatgtatttataggtaaacacggagcacttacttctattaaaaacttaagcactctagtatcctttttccttactgtaaaaaagagagatcttgtattatttatttttgaaggaatagatgcaaaaagagctttaagaacactcttcccttcttagaatatttgttatcctctattccctcgtttactacctttcatatatgtttttatatttcaaaatgatttcccctattaaaaaagaaccccctaatacaatagggggatttctagtttagccttatgaaaactgatataatatatattacgtttttcattctttaaaatagaaaagttttaataaccttgaaggtaggaatttttaatgaactcgaaagcaaaatttagtattcgctacaaaattatggctggttatttagttatcattttgttcttacttgtttctttcattatgttgaacaatgagatttctaatttacaaaaatctcgtaattttattattgatcacgattttaaagttctcaatttaacaaatcaagtggagaaagatttactaacaattgaaaataaagcgaaagggtttatcatttctaataatccaaattacgtacaatctcttaattctgcggaaaaggattacgaaaagcattatcaagatcttttctcattattagaggataacccatctcagcaagaaaaattaaaacagattaacgaaaatattattagttggataaataaagagattcacccgttaattgcaaatcataatagtaataatgtacaaacaatcgacacgactcaaattcagtcattacagtcacaggtaactaacttccgtagcactgaggagcaattaacgaaaaaaagagcagcacaattagatactgaaaataataaattagaaatttggttatacagtttattgttcttactttcttgtatttctattatcatttcactctatatttcgaattccattacaaaaacgattaaaaatgtaattcaagctattaaatccatttcttctaaagaaaaaatcacggaaagaattcatgtaaacacacgtgatgaaataaaagatcttgctcatacaacgaatcacttactagacgaaatatcgaaaagagaatggttacaaactgagcttgcagaattaattttaatgtatcaaggtgtatcttctattgagatgttaggtaaaaaaattcttagtggaattatacaaaaaacgcaaacttcttgcggagcattttatgtacgtgaagaaattgaagacactgtctactatgtgaagaaagcttctttcgccgatcaaggtgctgatattgggaaacaatccattcaaatgggtgaaggttttattggacagtctgccttagaaaagaaaagttttattctcagggatatacccgaagagtttcgttatgtcactagcggagtattagaaatacgtcctaaaaatctattaatcatccctatcttatttgaggataaagtgatcgcagtaatggagttagtaagtgtaactgagatttcagatttacatcaagatttaattcaacaaaccgttgataatctaggtttaacaatccatagcattatgggacgtatgcgaattcaaactcttttacatgaatcacaagcaatgacagaagagttacaagttcaatcagaagaattgcaaacgcaagcggaagaactacaaatgcaagcagaagaattacgaacaacgaatgaacaattagagtctagaactgaagaggctgagcagaaaacagctgacttacaaattactaaatcagaattagaagaaaaagcaagcgagttgttacgcagctcaaaatacaaatctgagttcctagcaaatatgtcacatgaattacgcacaccgttaaatagtattttactattatctgaaatgttaagagaaaatcataataacaatttatccgacgatgagattgaattagcaactgtcattcattcatcagggaaagacttacttactttaattaatgacatactcgatttatctaaagtagaagcaggcaaactagacatcatttttgaagcaacgaacataagtgacatggcagccaatatgcatcaaaactttttacatatagctgcacaaaaaaatgtcgaatttactattgaagacagtgatacgattcctgatctgttttatacagatgcaaaacggattgagcaaattattaaaaacttattatccaatgcatttaaatttacagaaaaaggatccgtttctttacatttcgattcgatagaaacaagtaatttaagtcatgatatgcagtctataagtaaagattggattacaatttcagtaaaagatactggtattggtatcgctaaagaacagcatcaacttattttcgaagcctttcaacaggcagatggcgcaacgattcggaagtatggtggtacaggattaggtttatctatttgtaaagagtttgctagattgttaggtggttggattacgttagagagtaatgtaggagaaggtagtactttcacggtatatattcctaaccttccaaatggattaccagatatacagttatccaatttagaagtcgcagcaacgatagaagatgttattcctgctgaagttgttgaagaaactatcgttactcccgaaacaaataacgtcttccaagagaaaaccattttaattgtcgatgatgatcatcgaaatatatttgcgttacaaaacgcattaaaaaaacaaaatgccaacattattactgcccaaaacggcttagagtgtttagaaatactaaaaagtaatacaaatattgaccttattttaatggatattatgatgcctaatatggacggttatgaaacgatggaaaatatccgaatgaacttagggttaaatgaaatacctattatcgcattaactgctaaagcaatgccaaatgataaggaaaaatgtttatctgctggcgcttcagattatataagtaaaccattaaatctacatcaactctattcggtaatgagtgtatggttaataaaataagtgaggtttagttggagtggaaaataagtattataattttgatccatcagtagatacggatgagcgcacgaacttagaaattgaattactattggaagcggtatttaaactatcaggatttgattttcgccaatatgctcgcacatctatttatagaagaatttgtaatagaatgcagctctctaatatccctaccatttcaaaattaattgaaaaagtaattcacgaggaaggggttttagaacagttattaaatgatttctcgattaatgtaactgagatgttccgtaaccctgccttttttaaagcgcttagagagcatgttattcctgaattaaaaaagcaacctgaaattagaatttggcatgctggatgcgcaactggtgaagaagtattatcaatgtccatcttacttcacgaagaaggattaagtgaaaagtcggttatttacgcaacagatatgaatacaaatgtgttagaaaaagcaaaacaagctatcctcccgttaaataaaatgcaaacttatacgaaaaattatttacaagctggcggtacacaagcattttctaactattattcaacagataatcgttttgcttattttaatccatcacttttacaaaacattatttttgcacagcataatttagtaaccgatcaatcttttaacgagtttcatattatactttgtcgtaacgttttaatttactttacaagtaaacttcaaaatcaagtgcagcaactattttatgaaagcttaggtcacaatggttttctatgtttaggaaataaagaaactcttcgtttttcaaatataatgccgcattatacccaatttaatcctagcgaacaaatttatcaaaaaatacaataaaaagcgtatgaaatcctctgtttggatttcatacgctttttatttcgcattcgtttgtatcataattagacacatatcatctgattgcgctttcttttgttcttccttgtaaaacccttctatctcgccttctaaatctccccattttctttctgtaaaagtacgtaatttctcttcagcctcaaattcatcatttgcaattgcttcaagaacaccatctgtaaacaatacgatttgagcgttcttctcaaaaggtataactgtctttttaacttttatttcatcaaaaaatcctaccgcacaactcccgtgatttagttcaaacatatttgtttcatcgactaaaacgtatccagaaggatgccctgcatttacatattcaatcgttctcttttctgtatctactactaaatatatcgctgtaaaataatatggaatatcgtcattctcattatgtaaaagagtcatatatttatttaaatctttaatgacaagttctggatcgattaaagatttaatcgtttcacgtaatacagacgaaataaacatacaaactaatgaagcagatataccatgtcccatcacgtctaataatataataccgtagcggttttcatcgattttataccaataatacatatctccagctaatttaaatgaaggtaagtaacttgcttcaatttttatataatcttctcttaatgggctacttaataagtttctttgtacttgcgtagctaaatctagttcattccgaagattttcttcttgttctttatgccaatttaattccgatttcaagcgtaacgctacacgcatacgtgctaatagttcaactttatttataggtttcgtaatataatccattgcccccatatcaagagcttcggccaacttattggcatcctctaaagctgtaacaaaaataataggaatatctttaaacttctcctctttttgtaatcgcctacaaacttcaagtccatcaatttcaggcatcataatatctaacagtattaaatcaatttcattatacctggaagaatcttctccaaattgaatgtattcgaaaagctcttgtgcagaattcagcgatacaagatcctgatatccggcttgctttaaaattttttcaattacaaagatgttaaccggattatcatcgacaattaaaatggacacaagttatttccccttttcttatttaaaatgtaaatctattatcattttctagtattgcatactcagttacaaaatgaaaatttcctactctaacataatttttatacagcaaaagaacaaacccccagaaatgagagtttgttctttcattctataaatttccactattaatttaataccattgctttgtcatttaaaagacgatctaattcttccatatgatttgtttcatctgcaatcatatcttctaactttacaactaactctgtcatatttaatttcgctgcctgttcttttctcgtttcataacgcttaattgtctcatattctgattgtctagcgtattctaacatttctctaacatcttctgcttgtttcactcgtaaagggattgtagtaggtgtaccacctaacgtcttaattttctccgctaaatatagggcatgtccttgttcatcactaatttcagattcaaagaaaggttttaacacttgtctatatataccagaaactgtagctgcattatggttatacataataattgctgagtattctcctgctaaatcttcattcaatccttcgattagttctttcacatcgtgtgacatttttatatctcctcctatatttaataagtaccccttttctcatgttttaaacataatgattttaaatttttatgtatctaaaaatgctgcttgcttcaatttacttatcgcttgtcttttaatacgagaaacgtgcatttgtgaaatacctaaccgttcccctgtatctttttgatttaaattttctccaaatatataatgaataacactcttttctgtgtcatttaatacgttgaaaatatcctttaaaacgagacgcctttctgcctcttcatatccttgctctacttcacctacagattcaatcctcgctaccgaactgccatcagatgaattttcaactacatcatctaaggaagatacgcgataattatttttcgcatccataatttctagcacttcctcttcggatagtcctaaatgatctgcaatctctttaatcttcggtgaacgctggaaacgatctgttagctcctctatagcaagtttaatcttcccgcctaaatctttaattcgccttggaacgtgaataccccaagttttatcacgtaaatatttctttatttcgcctactattgtaggtattgcaaacggctcaaaagcattccctatcgaataatcataccttcttattgcgcctaagagccctaacatccctacttgtataatatcctcatgcataggcccgccttttgaatagcgatatgcaatggagtatacaagatttttatagtgattaaccaatctttcctgtgcttcatcacattggttttgttggaagtctgcaattagtttaataacgtcttctttagtaagatttgtaggttgagattggatttccatcattctccacctgctctctttgtatatattttgtcattaaaactgtcatgccctcatcatgcataatttgtatatcatccattaacgtattgattaaatataaacctaaaccattttccggcaaatgttctactggtttactaatatcatacggaccaactttcctttttaagctattaaaatcaaagctaaccccattatccgcagccataatttctaatcgatcttcatatagcccgaagacaattgtaatttctccaacgtcttctttgtatgcatgttgtacaatgtttgtacaagcttcactaatagcaattttcatatcttctatatcgtcataagcaaagcccattcgattcgcaacaccagccattgttaaacgaataatagccacatattctgcttttgcaggaattttcatttctatcttttcaaatctctccatcatccctagtcaccttctttctactttttcaaaatcggaattcaaatttaatatttctgttagccctgtaatatcaaataatctttttagccttttagacacaccagtaaactctagcttcccatcatttttcttaactgcttttaataaagctataaaaactcctaagcctgtactatccatataatctacgttatgaaaatctactacaatatgaacctctttttcgcttgtaataggcattaccttattttttaaatctgatgccgtatacgcatcaatctcaccattaagttgtaccgtataacctacatcattttgcaaaatatttattgccaaattcatcatttccgcccccttatctcgaacttttactatttaattacccataaaaattagttttaaacatatttttttattttcattataaataaattttctacacctttctcggcttaacacttaaatcgtactaataaatgtttaaaacttataattttgtgtatgtataatgtataaacattatttttagggggatctatctatggaagagcacaactttaaaaagggagatttcgttcaattttcttatcgacacgatcatgctacaaaattagttggttccattattaacatactaacgaatacaattgtagttgatataagtaatagcgaggacttatctcatatagaaccaaggcaagtcgtaagaataaataattgtaaaaaggtaacgatggcttaatacataatagaaagtgtaatgttaatgagtggggggttcttcatcctccactcattcctatgtaaaatacataaaaaagcatccaaattagtttaattggatgcttttttatgtatttttatcagttcattaactttataactatatataataaacttaagattactatttattatcatacttacgctttccgcagcattctagagaagaatgtaacgattaaaataaagacgattgcacctaataacgctggaagaacaaaaatgcctccccattcaggaccccaatgaccaaataacgcactacctacccaagatccgattaatccggcaatcacgttaccaactatacctaacggaaagtcttttcctgtaatcattccagctaacgcaccaataagtccacctacaatacacgtaataataagtcccacaattaaacctcctatattcgttttatattgaattcatcaagctttagtatgtaactaaagcttgatgaacatatattattctttattatccaattcatcacttatcttttgtttcacttttccgactttttcttttatcgttcccttcgttttttcccacttaccttcatttttcaactctctatcttctgtaacttcaccaattccttcttttacttgtccttttttcttttcaactttacctttaacttgttcttttagtccgttctcactcatatttacaatctccttttcgtaatagatttatagatttaaaggatacaaatttaaatagaatacatgcatcttctttcttgtaaccattcaccgactctttctaaatccttaacgaataacaagattttcccttcatccagtttttcttcataaaagttcgcttcttcctcattaagccctaactcttgcattttatttcttaactgatctcctgttttttgaaagacgttaataatgcttgtcccaagtccctcctcttttatcccaattgtattcacgtctgcattgtccgcaattctatctgtcctatctttctcatgcgttaatacgtaaatatctttttggtctattccttttttcacgagatcattcgccgcattcatgacctctttctccgtaataaattcatatacaaaaggtttactatacttcgtttccatctttaacttcctcctttaaaatgaattatttgttatattatatgtagtacacccattttcgaaatgttaaacataaaatatgaaaaaagttatgtgaattttaattttaatagagaatgaacatcatcatttaccactttaaaacatcttctccttacaataaccacctaaattaacagaaaattgttataattaagcttgaggagggatactatgaaaaaaatcatatctatatgcgctctaaccgctttatctttcactttaataggttgtacaagtacctcggctacagataaagcttcacaagttaagcaagaacataaacaaaatacctttcaattaaattctgctaatattacagacattgaaatactgaaaacaacaaatcatactacttccaaatctcaaacagacaacgaaaaaatgatacaatctatcgtttcagcagtccaaaaaggcactcctaaacaaatcacactagatcaaaaaaagagagaatctgcacattctactattactgttacatataaagatgactcaaaagaagaatttcttgtgtgggctgataataaggagcaaattacgattgctaaagatgagaagaaagataaggtagaaggtgtgatagtgaatattaaagatgctaaaataatgaaggatttcttttaaaattctaattaacgttaaaaaaagtaggattacatcctactctttttttaatcatgctcaataaatagacctttataaaatctatttaaggtctaatttttctaaatcatgttgtaaaacattgtttccttcttgtgggttaaatacgattgcactaagaccaaaaacattcgtaacaacatctctatctttcggacgaatgattcttacttcataagcaaaaagtgctggaggaagagctgctgaacgaaaagtaacatatcgattaggtggcaatgtttgtgttgaagggtctattaatggtaacaataccggagaaccagatgaccaatcaaacatttcaactgttactctacgagtatcatctggatcaacattcatagcttcaacagtaagaaataacgtagcggaatgtctacgtaatacacccgttgacaaagtttcattgtgatgtttatgacatcttccaggaggatgaccatagccatagctcatatcaattcccccctttcatttacaattaaggacaagtattccttataatatataatgctagtattattttaatgaaaggtataaaagcggatttctatctattcgctcttaaagaataatatggattctcctgtttttcctttgaactcctgctaagaataaatctattttgaaaaggacctgctccatttattcgtaaaaagcataaagtaaatggaatccgttaaaacacatgagtgaacctttgtttttctcctcctatttaaaggaggaactgttatgggctttggtggtagttgtggcggctgtggcttcgctggaggatttgctttattagttgtattgtttattttattaatcatcgttggagctgcttgcttctgctaaaaactatcgaaaggacactcacgtgagtgtcctttcttcatgaaaaaagctctacgcaatgtgcagaggttcaagtgtaacgaatactttaaaaatgtagtattacattccccctccaaaatgaacttcgatgctataaatttcgtttaagtgcaatcttaatattttagtttaatagcaatatggtgaaactttattccaaacaatattgctattgcaccaaagtaaaacaaactggacaacctagatttcaaaaggaagacaccttaaaggttgtcttttctttataagtaaaaaaagcccgcctatttccgtaggcgggctttatctttattacacaatatgaaagtatactctctttttctttgaaattttatgtaattatacatattcatgaaaatagaagaagtgaaattgtacgtttagatacagtttggcaacaaactaactgttttcttgtgcattaatagacaactactgcaagagttatagtttttatgttttcatttcctttttgcatttctcttttaattagacgaatgctttttttagtacataataaaaaatatccagaaaaactgtcacaaaatccgtttttctggtttctctataatacaggtatcaaattgaaagtgaggtttaaacgaacatgttaaccatagaaaatgaagaaagtcatgcttctgatatgacctttgaagatttatttaagcagtactatgcttacgctgtgaaacaaatcatctggattgttaaagatcaatctatcgctgaagagttagcacaagaagtatttttacaattatatcgtagtgattggaaagagattgaaaacatacctggatggttgattaaatcttctacttatgtagcctataaccattttcgatctgaaaaaaggcagcaagcgaagattgataaagaaatacaataccatgaagtacaaaatgtttcatcattagacgatgattggataagaaaagaagaaattacaaaggtccaaacgatactaaataaaatgaatgatcgagaacgaacccttttactaatgaaattctctggttttcaatataaagaaattgcagaagtacttcaaattgaaatatcttctattggaacattattggtccgagccaaaatgaaatttcgcaagatttataaacaaatggaggaggcataacagatgaaatgttatgatatcgggtttattcaaacatatattgatggagaactttctcatgatataagaaaggaattcacaaaacacctagatacatgtgaagcatgccaagatttattaatagaaattagtaaattaaatcaatgggaaaacgtaatgctagatgaagaatctgcaaattcaccacaagaaatcaaaattgatatagaacaagcatggaaaacatttgaaagtcgttccaagttagacaatgtttctaatataaatcacaaaaaacaacaaaagaagggactctttacaaacatgagtaaaaaatcaaaacgttttatttatacagcagtagctgcagcagcacttttcacaacagcaatgattccacaagtacaagtggcggctacaaatgttgcttcctatttttctaatgcaattacaaatgataaagttgtaaatgaaggaataaaagatgaaaatggtatcacacaagatatgatgaagaatggtaaatatattcctattgatgaaaaaattacagatcaaggtattactgtacatctcaaagaagtatttatcgcagattcacgtatatcagttcattatagaatggaaaaagcggacggaagtttagtaccatttgaatttgatacatcaggattaaatcttgagagtgatggtaaaattgatgggcaacaagaggaaaaccctgagattaaaaatgacgggagactatcatttatccatgattcagatgattatcttccttttgaacttatggcagcaggtaaaaagttagataaaataggcattcgtgataatgatagacctgaaggtgttgctacatttgttataactactgaagaaaaagacgtttttaaacagcctcttactttagacgtaaatataactagaattggaaaagtaattggttcttggaaagctcaaattccaattgatacttcacatttgaaaaataatacgaattaacatgaaaaaaagaatagaacaatatgtatctaattctcagtttatatgtttccttgttttcgttacatttatttcgtatatagtttttactctatattttatttatgatttaagtttataaccttaaatcaatcatttaagaccattataagaaaaagccctctaaaaaagtgggggaataaataaccggtttcttaacgtataaggaatcggttattttgtatttaaaatgcgtctaaacgtacaattttctttttttgatatggtgacctccaatacatcattgtccttctctaagctcatatctattttaagaagagtcatttacaaattcaaaaaaaccctcaaagcatctactttaaggggatttctcctatcatcttctctcttcatacaatcgatttgctttatacgagcaaacgaaaaacatacatgtcgcaacggggataaatgtcaaaaaaagtcctctcattaatgcaaatggcgtttcaaataagaatgaccatagaaatgatacaccttgcttatcccataatcctggcgtcaagtatagttctttcggatttacaaaggctcctaaattcattgtattactatacataaataaaaataatatcggcaaataacagatcgctaattctaaaaatgttttagatagacgcttatacttccctgctcgtgacattggatctgaaaaaatgtcatcttcactttcttcatctacctttttaaaatattgcgtacctgaccaccgattaccagctatatgctcccaaccactatcttcaaataatgtgcagtaattaataaaatcactttttctactaaatactctatggtctattttaatcgtcgcatcttccggttctgtatatctaaatgtataaccaaatgtattgctttctagttgatagcctttccaagccatctcttctaaccatttttcctctttctcaaagtctaaaaagaattttaatctccacatcatcgtttcctcctaactatacgtgtaataaactttttgtaaccgcaataatgtgctgcattctcataaaatctaaatgcaatacttctttcccgcgttccgtaatgacatacacttttcttcttttatcttcactttttaccgattctattaacccttgttttaataaattttccaccgcaccatacaatgtacccgctgcgattttcacttgatgattactcagttcctccaccttttgcataattaaatatccatgagctggctctaataaagctaaaagaacgtaatacgttgtttccgttaatggtaaatttttatctctattcataaagacctccaatgtaacgataactatatagctaaactatatagttaaactgtatagtttaattttatacagtcagactgtatatgtcaaatgtaggaataactttataacccaaaacaaaaacgctacctttttaaaagatagcgtttttgttttacccttgcttattcttcgccttcatttgctcttcaagagattttttttcagtttctaacacactcatatcacttttcaacttttgcgtttcttcaaaatgttcatctactaatttattatattctttctcagagtacattttttcactggttgatgtcgttttttctttcgtaacaactacattaataattacaaataaggctacaattcctattaacgcaacgaaaatcttctttttattcatgattaatcctccaaaatgtaaaatttcaaaaattatcataacagaccaattcgctttcacctgtcacattttgtcgaatcaatataataaaaaaaagcatctgaaacagatgctttttctcattcttaatacgtaaacgtaatcgtcactaaagaatacccttctttcgcattgtaaggctccgctttataagaaacacggttgaacccttgcggataaccgatttccccaattgcatttttcacatcttgcagcgcaccgttcattgattgcttataaagtacttctatcttttctggctttgcactataacgctgctgcattttattttttaattcagtatagttatttgcaatatattcatttcctaaatagtttaactttgtatcttttaatatttgctgatatgcagacgttttcgtactacctgccgcaattttatttgtcagtgtactataataatttgttgtagcttgcggatagtctccacggttccactcatgatttcttgcgatttgttcatctgataaattgaaatacgaatacgttacgcggccctgctcatctggcaccggatcatcgaatgttgtatcaaggtgataccaattgttttcgattttcactaaattccaagcatgaggttgtccgtccccagttcctgtcacgaaatgattttcaattcctgcttcttttaataattgataagttaatagtgcgtaaccttggcaaaccgcagaacgatttacaagtgcttcatatgctgtgtaagctttataagacgtatcataagaaacatgctttactacgtaatcatgaatcgccttcactttttcgtgatcatccattccaacttgagtgatagaagaaacgattgctttcgcttgtttcatgacatattccgtctgttctttcgtttcacgatatgtaatcttaagcgtaaacgtataatttccaggtgatccagaaagtccatatgaaacattcgatctattattatttgtatactcattcttacttgccacttctttatatgcgttaaaaagtgtattcatcacttcgtctgtattattatttttcgttttatatggcagtgtaatatttgtctcgtatgtattaatacgcttttgtacttcctctttaaacgctgttaataatgccgcatctcctgtatctttcacatcagcatttttatacttcaaagttttatataaaaactgcgcatactgttcacgtgttactgtgccatacggttcaaaattcccgttccctgtgccatctgcgattccatttgactgcaccgcactaattgcattttctgcccaaaatggatttggaacatccttaaaggtatgtttttgttttgccgcaagatggaaagcattcgtaagaatttgtgccatttctgcacgattcacagaagctttcggtctaaattggccattttcatcacctttaaaaactcctaaatttgttaaagttaatacctcttctgggaacattgtagaactttgattaatatcaccgtaaggatttttaaacgtagacccatcctttaatacgtaacgagttccatcattactaaacgagccgccttgtttatttggtactaacactcgataaattaaagccgcaacttgctcccttgtcgcaacatctccaaaaccaaatatcccatttccataaccggaaataatatttttactcgctaaatctttaatcgcaggatatgaccaatgtgatgtcggcacatcagaaaaaacacccacttcagcagcttttacatcgctgccatttgtatataacaacgcaccaccaataagtgataatgatgtaattgattttaatagttttgtatacataatgtcttctcccaatacgctctctatttttgttggtttatgtcgaaaaatctaaaaatatgacaaaatatattatacaattaaaactttttaagggatatattaaattttaaaatatgcaaaaattcatattgttataaggattcatagtgatattatgttattttacttgcgaatatataaataaaaaaacgctcatctgagcgtttcatctatatacctaataattacttttttctacacttcgaactcttcttcggtaataatcctttgatctaacaactctttatactccaatatttctttagccccacgactctccatgcgtatattgtataacactttttgtattgacctttgattggtccgttgaaagatttactccatttagaaataattctattgaatttttcaccactagccacaaaaacatcttataatctttatataataaactacagtattaggagtagataaaatgccagttacactcgaacttattcttttcattcttatagcaattagtgctgttggctatttaataaaagaatttcaaaaaactaggaaacgaacacttggaatttcactagaatttttagttcttttctggtcaatatggagaatatcaactctcataatctaatttataaaacatgaattccttcgaatgaagtgaaactctaatcagtgggggttttacgggataaatttaccagtattttcaccacaacattcatgttaaaatcccttgtgagtacgacataactcgaccttatgaagctccgcagcttttatcgcggagctttttttatttaaattaacgcttttgttcacttttttgatacatttacgaaacattcatatgttacgttatataagtccttttttaaatcatattcattctagtaaaaagtcctagtccccctaggactttttgcattcaaataatgagttgtcttttttctcaataaccgaaactatttaacatggtaaaataataattggactggcatccaataccatattacaatggagcaaatcgcaagaaggcaccttagagtgtcttttttgtacataaaaaaatcttaccatcttatagaaacgataagccctttaaaacaataattgcaactatattaactttacattacattaaggttagagaatgttcttatattaataaagtgctaaatagtaggtgaaaaaatggaatttaacgatttgggtattaccattaaagaacttagaattaaaaaaaatatatcacaatccgacttatgtcacggaatatgttcacaaagtcaaattagtaagatcgaaaaaggtatgatttatccatctagcatattgttatatcaattatcagaaagactcggtgttgatccaaatagtatatttgcactaactcaaaacaagaaattaaaatatacagaaaacgtaaaatacgtaatgagggattgcataaggcaacatcaatataaagagctttatgaaatagtaacaagagaaaaatacacaaataattttcaaacaaaagaagataaacaatttctaatatggcatgaagcaattgctatatattgtgtgaataactcaacaaaagtggctttaactcttttaaataatgcactaaaactaactgtaaccaatattgattttttatcagagagagaaatagatattctacatacaatggctatacttcatgcagaaaataaagaatacaaaaaaagtattactatccttaaaagatgtttaaataattttaacaaattagattttcctagagataaagaaattaaattgaaaatcatttataatttagcaaaaaatttaagttacacatatcaatacgaagaagcaataaaatacattgataagggtatccaattagctattaatctaaatactttttacttattgggtgaactatactatggaaaaggttcaaatttattaaagcttaaacaatataatgaagaagatgttgctaataacatgagaaaatcattatttatatttgaattaacaaaaaacgaaaaaaaattacaaataattaaagaagaatatttcgaaaacaaaaataaccactcataatttcttaaaaactacttataaaactcacaggaaaaatcccaatagtttttaaacttagaaccatattattgttttaattcagaggaaggcaccttagggtgtctttttttattttcaaaaggacctgctcaattaattcttaaaaacatactaagaaacattgttttatttatcccattttcattcatgctatataaaattcgttaataaatccacctcaaacatatttatatgcattggagtatgtttgaggtggaactccttcaaatactagttccttttataagccgtttttttgatgtagatgacattattctcaatacaatagaatgaattatgggaacatacttagcaatatatatcaaaaaacaatattaagaaaacccctccaccttaaggtagaagggatcttctaatttctatttcaaactacctaaaatttccgtaaagataacccaaagcgtatgtgcacctgcatctggatatcctaaacttttttcaccaactaccgctcctctgccgaatgatctttcaccgatagattgtatgccgtgaagtgctacttgtaacatttcaattcagatatacgacaggaaagaatacatcatcacagtgtcagcaagcaaaagtgtattctgcatttctgaaaacagtagatggcagattgtgacctactgaatctgctaagaaagaatatacaagaacatccttaacatcctctttatttccactaatgatgacatcaaggaaatcttctacttgaaattctggagtaaacaacacaatcttagttgttctgtttggttctaaagaaacaaaagtacgagagatttcaactaattcattttgagttgggaaaaaggtgtttcgacttctcttaacagttaccgttacattactagtatggcagcgtgaatcattgtttaacataatgttgagagcagttggaataatcccattttcagaaactggaactcgaaacactccagtagatttatgagccatataatcagatccttccaaaataaaatatatttacaatatattagatgcaaaaaacgttcattttgatatggacaaattatatgattaatatatctataataaccctcggtattactaagccaatgttttaaaagattaacaaataattacctctgcaaatttagaaaatatctacactttttacaaacattattacaattagataaactaaagcaatatctcattaacaaagggactccataattggagtccctttgttaatgagatattaaaaatgatcagcatgtgaatattgtataatttcttccttttttagagcatgttgtgtatcacctgtattgttactaaatgataatactatcactaatcctaacgtcgctaatataagcttcttcattattttaacgcccctttgcttagtagtttttgtttcgcttcgtaacatacatcgaaataatcactaactttttcatgcttattcaatttgctgcgacaacatcatttgataaaaatcattaagttgttgcataactgcttcatacattaaaatatttgtgctcatatcactacgtcctcctcaactacttctatttacctaaaaattatcataattctgtaaattatataatagttcaacctctaattgtaaatcgataaaaaacaacagaatattccgaatcaagagaagggattggctaacaaatggttactgtataaaaataaaaaacttgtgatattgcttttatcatatttgctcttatatatggttctgttacaaagtttgctaagttaatataaactctagaaaaaatgaataaagatcaccacagctgagctatctttaatccgtataataatataaacattctattaattcatattattaataaggaaatacttaaatattcgatttttttctaaaagtgtattatactgtaaattgctgagggatacattttagtattttctggtaaatattcagtttgttaggttgttattagtattatggtaacgaaaaacttatattttcccttgaagataaagcattagcagcaattacatccagatatcataataataattattttcttaacaatatcacggaattttaattcagaaaattcgaacccttaagtaatataaagtgctaaataaaatatttagacaattgaagtccaacaacgattagaagatatatatattagaaaaggaattttgggagagcttatcctatataactaatacatatagcgttgtatctttaaatcaataaatttttcgataagctagttaatagattattgaatttaatcttttaatagagttaaaaaaatcaactttacattctaatttagaaattattaggtggtgtcggtagtgtttgagtatcttttagttaaagctttatttactattttcttaattagcctaatcgtgttaatcagtttaatatggactaaaatagaaaaaattctggacgagactgtatttaaaaacgtttctgaaaaatccagatatgtagtaactatggtaattgttatggtaggagaatttgttctcatagtcattacttcattaaattggagagcttcaattattgacacactcttttttggtagtattattttattctgctgtatatggctaataccttattttgttaatcaacaacaaaacgtcgctaaagttatggataagcattttagtggaggggtagatttaggtgaaattcaagttcatcgtgcgaaactttctgcatttaatttaggaagtattgtattttctatagtgggaattattatacctatttgttattattttaaatactttttataacggtttattggttctgttggaaattttttaaagatatagtaataggtgagattacagatatttatgtagaaacaacttagatgtataagacaatccatgtgagcgaaaacagtaaaataccctataaggtctcttttacttgtattaattaaaaaatgatactaattataaatgctaacttaaatatgtacattaacgcttgaataaatatgtacattttcaattggattctccatactgactctgaggtggttagtatgtatattaagctagatattcaaacagaatttgaggttaaaagtctttcagacttaccaaattttaaaaaactaatggggaacttaaaaatgaagataaataaaagtcaattagccagagaattgaatgtggatcggcgtaccatagataagtatttgaatggttttacaccaaaagggacaaaaaataaaacatcgaaaatcgatacatattatgaagtgattgcagctcttttatctagtgattctaaacaaatcttctactacaaacgagtgttatggcagtatctaacagacaatcacggtttaaaatgttcacagtctgcatttcgtgcttatattaatagaaagcctgaatttagaacatattttgatgaggggaagcgtattttatcaggtcattcagtgggtgtccgttatgagacacctccaggagaacaagctcaattagattggaaagaaagcatacgatttgaaaccaaaagtggcgaaatcgtatatgtgaatgtagctgtacttttattgtcctactcgagatttaaagtttttcatttgaatatttcaaaatcacaaagtgttttaatgtcatttatgacagaggcatttgaaatgtttggtggtgtaccgaaggtaattgtcacggataatatgaagacggtaatggatgaagctcgaacagaacactttacaggaacgattaacaataagtttgcccaattcgctcaagattttggatttaaggtacaaccttgtatcgcagggcgaccaaataccaaagggaaagtagaagcgccaatgaaacttctagacgaaattcatgcttatcaaggaagattcacttttgaagaattacatgaatttgtgcaaaaattatgtgcaagaattaatcaaacatttcatcaagggactggtaagattccagtgtttgccctaaaacaggaaaagaatctcctacaaccactcccgaagagcgcggtgtggagtgggggaaaaggtagagataacttcaaatccttacctatcactaacaagagcgtcgaggtgtatttgaagaagcggcaggcgtactaaaatacaaacttcgcaaaaagaaagctgaagggaaactagcagaaacacaagaaaacttaaatcgtgtacaagatataattcatgaattaagtagtcaagtagaacctttagaaagacaagcttctattgcgaaagattatcttgagaataaagaagaattagagaaagtagaagctgcgcttattgttcatgaaattgaagaattgcatgagaaatgggaagcgcttcgaaatcagtttgggcataataaaaacgaagaagctaaaatgtcaacgaatttacaaaaaagtgaagaagagcttgaggaattacgaggacaattacaagcggtagacgagtctgtagactcgttgcaagaagtacttcttctttctagtaaagagctagaaaaactagaagggcagcgtgagttgttaaaagaaagaaagcaaaatgctacgacgcattgtgcgcaacttgagcagttaattgttgaattaactgagaaagctaaaagttacgatggtgagattgagtcaagtacagaatctttaatgcaatttgtgaatgaagtaaaagagttggagcaaaaattgcatgataatgagcaactgcttgctacttttgctgacaatttagaggaacagattgagaatttaaaaggtgactatattgagcttttaaatcaacaagctagtcatcgtaatgaattatctatgattgaagaacaatcgaaacagcaaacgtctaaaaacgagcgtctagatgaagagaatgcgaaatatgtagaaatgcgtatggaaattacagcgaaaaagacgaaacttgtagaaagttacgaacaagcgaaagaaaaagtagctggcattctctcaaatatacagaagacagaggcggcgcttgggaaatgtaagacgcagtatagtgaaaatgaaacaaaactgtatcaagcatatcaatttgtgcaacaggcacgttctcgaaaagaaatgcttgaagagatgcaagaagattattctggattctatcaaggtgtacgtgaagtattgaaagctagagaaaataggttgcaaggtatcgagggtgctgttgcggaactgttaacggtaccgaaagaatacgaagttgcaatggaaatcgctctaggtgcagcgatgcagcatattgttgtacaaacagaggaacatgctcgtaatgcgattgcatttctaaagcaaaataaacatggacgtgcaacgtttttaccgcaagctgttattaaaagcagatcgttatcatttgagcaattacgcattgcaaatcaacacccatcgtttgtaggtgtggcggcagaacttgtgcagtacaacaataaatatgaaaatgtagtttcaaatttattaggtactgttattgttgcgaaagatttacgtggagcaaatgagttggcgaaacaactgcaataccgttatcgcattgtaacaatcgaaggcgacgtagtgaatcctggcggttctatgactggtggggcggtaaagcaagcgaaatcttctttattaggacgccaacgtgaactggaagagtggactcgcaagttaactgatatggaagaaaaaacaacgaagttagaaaactttgttaaagcagtaaaacaagagattcaagaaaaagaagtgaaaatacgcgaactaaggcaaactgtagaagcagatcgtgtagatgagcagaaattaagagaagagattaatcgtttagaattagaagaacatcgtattaatgatcggttgtctatttatgatttagagattgaagggtttttacaagatcgagtaaaaatgcaagggcgtaaagaggagttagaaggggttttaacgaatcttcaagctgaaatcactaagttagatagtaaaattgtagctttaacaaaacaaaaaagtgagcaacattcttcgaaagaaaaagttcaaaaagaaatgactgagttaaaagtgctggcagctgaaaagcaacaacgcttatctaatcaaaaagaaaaagttgaacgattgacgaaggaaaaagaagaaacggatgcgacacttgtaaaaacgaaagaggatttagcgttcttaaaacaagaaatgacatctaattcaagtggtgaagagcaaattacgaatatgattgagaagaaagcatatgatcgtaatcaaacttcagaattaattcgctctcgtcgtgaacaacgtgtatcgttgcaagagagagtagaacatttagagcgcaatttgaaagaaacgacaggtaaacataaatatgttcttgaaatgttgaaagatcaagaagtgagaataaatcgactggatgtagagttggaaaatagattacaacatttacgtgaaacatatacgatttcatttgaagcggcaaaactaaaatatacaatgacaatgcctgcagaagatgcgcgtaagaaagtaaaattaatcaaattatccatagaagagttaggtacagtgaacctaggggcaattgatgaatatgaacgtgtagcggagcgtcatacattcttactagagcagagagacgacttagaagaagcgaaagcgacattgcaccagcttattaccgaaatggatgaagaaatgaaaaaacgcttttctactacgtttgaaggcattagaatggagtttcaatcggtattctctgaattatttggaggcggtagagcggatttagtaatgactaatccagaggatttactaaatacgggtattgatattgtagcacaaccgccagggaagaaactgcagaacttaggtttactttcaggtggagagcgtgctttaacagcaattgcgcttttatttggtattttaaaagtacgcccagtaccgttctgtgtactagatgaggtagaggcagcccttgatgaggcgaatgtagctcgttttgcacagtatttaaagaaattcagtgatgagacgcagtttattgtaattacacatagaaaaggtacaatggaagagtctgatgtgttgtacggtgtaacaatgcaagaatcgggggtatctaaacttgtttcggttcgtttagacgccggagaagaacttattgcaagtgaataggaaggatgggaaagtatgagtttttttaaaaaactaaaagaaaaaatttcaaaacaaacggatacagttacagagaaatttaaacaaggattagaaaaaacgagaaattcatttgcggataaagtgaatgatttagtgtatcgttaccgtaaagtggacgaagatttcttcgaagagttagaagaaattttaatcggtgcagacgttggcgttgcgacggtaatggaattaattgaccaattgaaagaagaagtacaacgtcgtaacattcaagatccaaaagaagtacaagctgttatttcagaaaaactagtaggaatttacaaaggtgacagcgattttagtaacgaaattaatatgcaagaggaccaattaacggtcgttttatttgttggtgttaatggtgtaggaaaaacgacgacaattggtaaactggcgcataagtttaaatcagaaggtaagtcagtcctattggcggcaggagacacattccgtgctggagcgattgaacaattagaagtatggggcgatcgcgttggtgtagaagtgattaaacaaggatctggatctgatccagcggcggttatgtatgacgctgtacaagcagcgaaagcacgtaaggtagatgtattactatgtgacacagcaggacgcttgcaaaataaagtgaacttaatgaaagagttagagaaggtgaagcgtgtaattgagcgtgaagtaccaggtgctcctcatgaagtattgcttgttattgatgcaacaacaggacaaaacggtttaagccaagcgaaaacattccgtgaagcaacgaatgtaactggtattgttttaacgaagttagatggaactgctaaaggtggtattgtattagcgattcgtaacgaaatggatgtaccggtgaagtttgttggattaggagagcaaatggatgacttgcagcagtttgatccagaacaatatgtgtatggtttatttgcgaacttagtagaaacagaagaagtataagcgaaagaagcggtatttccgcttctttttctataaaaaatatatgatgttaagaaaaaaacttgacactcttttggactacatgtaaactaattcatgtaaagggaaatcacttaacaaaggatgatccaacatgctcgaaaaaacaacgagaatgaactatttatttgatttttatcaatcgttgttaacgcaaaaacaaagaagttatatgtcgctttattatctagatgatttatctcttggtgaaattgcggaagaatttgatgtaagtcgccaagccgtgtatgataacattaaacggactgaagcgatgcttgaagaatatgaagaaaaattagtattacttcaaaagtttcaagagcgacagcgacttgttgcaaagctaaaacagctaatcagcgaagaagagcatgtgaatgaagaaatgaaacaagttgttgaagctatcgaaaaattagattaggagggcggcaatatggcatttgaaggattagccgaccgacttcaacagacaatgcaaaaaatccgcggcaaaggaaaagtttctgaagccgatgtgaaagaaatgatgagagaagttcgtctagctcttttagaagcggatgttaactttaaagtagtaaaagattttgtgaagcgtgtgtctgaacgtgctgtcggacaagatgtaatgaaaagtttgacacctggacaacaagtaattaaagttgtacaggaagaacttacagaacttatgggcggagagcaaagcaaaattgctgttgctaataagccaccgactgttattatgatggttggtctgcaaggtgcgggtaaaacaacgacgacaggtaagcttgcgaatttgcttcgtaaaaagcataatcgtaaaccgatgcttgttgcagcggatatttaccgtccagcagcgattaaacagcttgaaacattagggaagcaattggacatgcctgtattttctttaggagatcaagtaagtcctgttgaaattgcgaaacaagcgattgcaaaagcaaaagaagatcatcacgattatgttttaatcgatacagcgggtcgcctgcatattgatgaagaattaatggatgaattagcgaaagtgaaagaagttgcgaaaccggatgaaattttccttgttgtcgatgcgatgacggggcaagacgcggtaaatgttgcacaaagtttccatgaacagttaggtttaacaggtgttgtattaacgaaattagatggtgatacgcgcggtggtgctgcattatctattaaggctgtaacaaacacgccgattaaatttgctggtatgggtgaaaaactagatgcaattgaagcgttccatccagagcgtatggcatcccgtattttagggatgggcgatgtcttaacgttaattgaaaaagcgcaagctacagttgatgaagagaaagcaaaagaacttgagcaaaaaatgcgtacgctttcgtttacgcttgacgatttcctagaacaacttggacaagtgcgccaacttgggccgcttgatgaattgttaggaatgcttcctggtgcaaataaaattaaagggctgaaaaatgcgcaagttgatgaaaaacaaattgggcatattgaggcaattattcgttctatgactaaattagaacgagaacaaccggaaataatcaatgctagtcgcaaaaagcgcattgccaaaggtagcggtacaactgtacaagaaatcaatcgtctaattaagcaattcgatgacatgaaaaaaatgatgaagacgatgacgggaatgcaaaaaggtaagaaaaaaggactaggtggattgaagtttccattcatgtaaggaaaaaaagatggctctgttaagaaaaaatactttacaaagcaatagtctttttgctaatataattatctgtgtgaaataaattcggaggtgctttataaatggcagttaaaattcgtttaaaacgtatgggagctaaaaaaactcctttctatcgtgtagttgttgcagattctcgttctcctcgtgacggacgtttcattgaggaaatcggaacttacaatccagttgctcaaccagctgaagttaagatcaacgaagaagcagcattaaaatggttaggaaatggtgctaaaccatctgatacagttcgtaacttattctctaaccaaggtatcatggagaaattccacttatctaaacaaggtaagtaattgaggcaatgactatgaagaagttagtcgagacgattgtcaagcctcttgtcgattatcctgaagatgtaaaagttacacaggaactttgcaacggagagataaagtatcgattaactgtacatcctgaggatgttggaaaagtcattggaaagcaagggagagttgcgaaagcgattcgaatgctcttgtattcagtgggacatcataatgatgaaaaagtaacactggaaattcaataaacgtaaaaagggcgaggagttattcctctcccttttttaacatttaaatagagattgcatgttccatctgcgaaatggagatgcttaatttatatagaaaccaggggtgacatactatttatgacaaaatggtttaacgtagggaaaattgtaaatactcatggcgtaagaggagaaatccgtgttatttctcgtactgattttccagaagagcgatataaagtaggaaacacgctatacatatcgaatgagaaaggcacagactatcttccggtgaaggtaacttctcatcgccaacataagacattcgatttattaacatttgaaggatataacaatgtagatgaagtagagaagtttaaaggttctttaataaaagtaccagaagagcagttaggcgaacttgctgaaggtgaatactactatcatgaaattattggttgcagtgttgtaacggaagaaggagaagcgctagggacaatcaaagagattctatctcctggtgcaaatgatgtttgggtaattaaacgcccgaagggtcaagatctcttaattccttatatcgatgatgttgtacttcaagttaatattgaaaataaattagtaaccattcatgtaatggaagggctgctataatgaaaattgatattttaacgttgttcccagacatgtttaccggtgtatttggatcttctatattaaagaaggcgcaagaaaaagaagcggtaaaccttcgtgttgttaactttcgtgattatacaacaagtaagcataatagcgtagacgattatccttacggcggaggagctggtatggtgcttactcctcagcctatttttgatgctgtagaggatttgacgaaagagacagagcgtaagccgagagttgtcttaatgtgtccgcagggcgaaagatttacgcagaagaaagcggaagagcttgcaggggaagaacatttaatcttcgtatgtgggcattatgaaggatatgacgaacgaattcgtgagcatctcgtaacggatgagatttctattggtgactatgtattaacgggcggagaattagcctctatggttattactgatagtgtggtacgtctcttgccaggtgtgctaggaaatcatgcttcacaagtagaggattcgtttagtacaggtttattagagcatcctcattatacacgtccagctgattttcgtggtatgaaggtaccggatgtattaatgtcagggaatcataaaaacattgatgaatggcgacataaggaatctttgcgccgaacgtatacgcgtagacctgatttattagatgagagagagctatctaaacaagagaaaaaatggcttgaggaaataaagcgagagcagtaataacttcatatatttgctattgcaacaggcctagtaatatgctattataacatttgtgctactgaaatcagtagccgtattaacgatgttccgctgtaatttattaagactttataagagcatctgtttaaaggagagaatttaatatgcaacaattaatcgcagaaattacaaaaggccaattaaaaactgaccttccttcattccgtcctggtgacactttacgtgtacacgtaaaagttgttgagggaactcgtgaaagaattcagcttttcgaaggtgttgtaattaaacgtcgtggtggcggaatcagtgaaacattcacagttcgtaagatttcttacggtgtaggtgttgagcgtacattcccagttcacacgccaagaatcgcgaaaatcgaagtacttcgccgtggtaaagtacgtcgtgctaagttatactacttacgtaaccttcgcggtaaaaaagcacgtattaaagaaattcgataagacatgtatgggagcttgtaaatgcacaagctccctttttccaatctatatgaaattttggtataatacgagcagtttacataaccgtggaggggaaatgcatgaaaaaagagaagagttcactttgggaatggattaaagcaattttgattgctgttgtattagctggtgttattagacagtttttctttgcgccaattctcgtagacggggtatcgatggcacctactttacatgatcgtgatcgaatgattgtgaataaaattggttatcacattggagatccaaaacgctttgatattatcgtatttcgagcaacagaagataaagattacattaagcgcattataggcctgccaggcgatgaaatagagtatcgtaatgataaactgtatattaacggaaaggcttatgaggagccgtatttagacaagcagaaaaagcaaattgctgacggaccgcttacatatgattttaatcttgaagaaatgacaggcaagaaaaccgttccaaaagatcaattatttgttttaggtgataatcgtcgttttagtaaagatagccgttcaatcggtacgatttcaatggatcaagtaattggtaaagctaatatgttatattggccgttagaagacgcacgtattgtgaaataaatgaaaaagaaggtggcaacatggtaattcaatggtttccagggcatatggcgaaggctagacgccaagtaacggagaaattaaaattaattgatgttgtaattgaacttgtagatgctcgattaccattatcatctcgaaacccaatgattgatgaaatcattacacataagccaaggcttgttgttttaaataaagcggatatggcagatgatcgtttaacaaaacaatggatcgcatattttaaagaaaaaggccatatggcaatttcaattaacgcgcaagctggacaaggtatgaaggaaattgcagcagcttgtaaagtgcttgttaaagaaaaatttgataaaatggttgcaaaaggtattagaccgagagcgattcgtgcattaattgtaggtataccaaatgttggtaaatctacattgattaataaattggcaaagaaaaatattgctaaaacaggagatcgtccaggtgtgacaacagctcaacaatggattaaagttgggaaggaaatggaattgttagatacaccaggtattctgtggcctaaatttgaagatcaattagtgggtcttcgcttagcgacaacgggtgcaattaaagattcaattttaaatttacaagatgtagctgtttacgcattacgttttatggagaaacattatccagaacgcttgaaagaacgctataatttaaatgagattccagaagatattgtggaattattcgatgcaattggaaaaaatagaggctgcttaatgggcggcggaatgattgattatgataagacatctgagcttgtgcttcgggagcttcgtggtggcaaacttggaaaaatgacgtttgaaacaccggaagagtttgcagagcaagtagaagatgtggaaaaaatagaagaagtataagacgtgcgtttgtgcgtcttttctttttggatatgtttaaaaaggagcttgtataaatgcaaactataacgataaaagaagcagaaaatgtattgaaagaaattatgaatgaagaagatgatcgctttcaactgttaatgaaagatgatcgaaaaggtgttcaaaagctcgttttgaagtggtataaacaaaaagagttagaacagaaagaaaaagagaagttttttgagatgtccaagtatgaaaatgctttgcgtgaaaaaggggtcacatatatcgcgggtattgatgaagtagggcgtgggccattggctgggcctgttgtgacggcagctgtcgttcttcctgaggatttttatattccagggttaaatgattcgaaaaaattgagtgaagcgaaacgtgagcgtttttatgatgaaataaaagtacaagcaattgcaattggagtaggaattgtatcgccgcaagttattgatgacattaatatttaccaagcaacgaaacaagcgatgttagatgcagttgcgaatttatcttgtacaccccaacatttattaattgatgcgatgaaacttcctacaccaattccgcaaacatcaattattaaaggtgatgcgaaaagtgtttcgatttcagccgcatccattatcgcaaaagtaacgagagatcgtatgatgaaagaactgggagagaagtatcctcaatatggatttgagcaacatatgggatatggcacaaagcaacatttagaggcaattcaagtgcatggagtattagatgaacaccgaaagtcattcgcgccaattaaagatatgattcaaaaataagttgtaaatatacagcttatttttttattttggcatataaacattactatttccgaaaaagaataaagcgatttcagttttctgacactttattgtagacagcgtgccaatcatcttatacaatggcaatgtaatgttttttaaacattaaaaaacttttcgagtaaaacaggaaaacaggggaggatgggaccatgaatatccatgagtaccaaggtaaggcagtccttagaagctatggggttagcgttccgaacgggaaggttgcatttacagtagaagaagctgtagaagcggcgaaagaattaggaacagatgtatgtgtagtgaaagcacaaattcacgctggtggacgcggcaaagctggcggagtaaaagttgcaaaaaatttagatgaagttcgtacatatgcagaaagcattttaggaactacacttgtgacacatcaaacaggtcctgaaggtaaggaagtaaaacgcttacttatcgaagaaggttgcgatattaaaaaagaatattatgtaggtctagttttagatcgtgcaacttctcaagttgttttaatggcgtctgaagaaggcggaacagaaattgaagaagtagcagaaaaaacacctgaaaaaatctttaaagaatatattgatccagcagtaggcttacaaggtttccaagcgcgccgaatcgcatttaacatcaatattccaaaagagcttgtaggacaagctgtgaagtttatgatgggcttataccgtgcgtttatcgaaaaagattgctctattgctgagattaacccacttgttacaacaggtgaaggtaaagttatggcattagatgcaaaattaaactttgattctaatgcattatatcgccataaagacattttagagcttcgtgatcttgatgaagaggattcaaaagaaattgaagcttcaaaatacgacttaaactacattcctttagatggaaatatcggttgtatggttaatggtgcaggtttagcgatggctacaatggatatcattaaacattaccacggtgacccagctaacttcttagatgttggtggcggtgcaactgcagaaaaagttacagaagcattcaaaattatcctttctgacaaaaatgtaaaaggtatctttgttaacatttttggtggcattatgaagtgtgatgttattgcagaaggtgttattgaagcaacgaaacaagtaggtcttgagttacctttagttgtacgtcttgaaggtacaaacgtagaactaggtaagaaaattttaaatgagtctggcttaaatattgttgcagcagaatctatggcagacggtgcacaaaaaattgtttcactagtgggctaatagaaagcgggggagaaaaatgagcgtattagttaataaagatacaaaagttattgttcaaggtattacaggttctcaaggtttattccatacaaaacaaatgattgaatacggtacgaaaattgtcggtggtgtaacaccaggtaagggcggcactgatattgaaggtgtaccagtatttgatacagtagaagatgcagtgaaagcaacaggcgcaaacgcttcagttgtatacgttccacccgcttttgcggcagatgcaattatggaagctgttgatgcagaaattgatttagtagtatgtattactgaagggattcctgtattagatatggtaaacgtaaagagatatatggcgggtaaacatacacgtttacttggaccaaactgcccaggtgtaatcacaccggatgaatgtaagattggtattatgccaggatatattcataaaaaaggtcatgttggtatcgtatctcgctctggtacattaacgtatgaagctgtacatcagttaacacaagaaggtattggccaatctactgctgtaggtatcggcggagaccctgttaacggtacagactttattgatgctttaaaagcatttaatgaagatgaagaaacacatgctgtaattatgattggtgaaatcggcggtacagcagaagaagaggcagctgaatgggtaaaagctaatatgacaaaacctgttgtaggcttcattggtggtcaaacagcgcctgctggcaaacgtatgggccatgctggtgcaatcatttctggcggtaaaggaactgctgctgaaaagattaaaacaatggaagcttgtggcattaaagtagctgaaactccagcagttatgggagaaacgctaatctctgttttaaaagaaaaaggtttatttgagacttgtaaaaactattaatctgttgaaagacaccttcttacttgagggtgtctttttagactttttctgtttacataataaaaattatgggtaaggagaatcaagatgaaaagagagagattattacatcttcattacttgctagcagattattggaaagcgatggagaggctactatatgtcgatccagaattagagaacatatataattttaacgaaaaacaaatggaacactacactggaatatcctcgaaaaaatcttcagaactagtaaaatttcttcaaagttcaaatcttccgcaatatatatcttatttagagaaaaatcgtattttttatataacgatatgggatgaaaattatccgcaattattacgtgaaatacaagaccctcccttcgttttatatggaaaaggagagaaagatttcctgaataaagtaaataaattagcagttgttggaacgagagaaccatcattatatggtcatgagagtttgaagtttattttacaccctttattagaaagagagtggcttattgtcagtgggtttgcaaaagggatagatacaatgtctcatgagattacagtaagacatcattgcccgactattgcgatattagggcatggattgtcttttatgtatccgaaagaaaatagacctttatatgaaatgtggaaggaatatatattgttattgacagagtatccgccgcactatgcaccgaaaaaatggtattttccaaaaagaaaccggattattagtggtataagtaaaggtgttttagttgtagaagcgaaatcgagaagtggaacacttattactgcggaccttgcgttagagcaaagtagagaggtatttgcgcttcctggacctatatttatagagggggcatcgggaacgaatcatcttattcagcaaggagcaaaactagtaagaaatgcagaagatatcttggaagagattttaaattaaccttatatttttatgtttttattaaacaattattgacaaatggtagattggcactgtatggtatattcattcttgattgacaaaaacaagagaaatcaataagattaatgaagacttgaatccacctcttaaggaggcactagcatgtcagattacctcgtaatcgtggagtcgccttctaaggcgaagaccattgagaaatatttagggaaaaaatacaaagttgtcgcgtctatgggacatgttcgcgatttgccaaaaagtcaaatggggatagaagtaaagaacaacttcaccccgaagtatattaccattcgtggtaaaggtcccgtcttaaaagatttaaaatcagcggccaaaaaagcaaagaaagtctatctcgcggccgatccagaccgtgaaggggaagcgattgcttggcatttagcgaatacgttaaatgtggacgttgaatcagattgtcgggttgtgtttaatgagattacgaaagatgcgatcaaagaatcatttaaacatcctcgtgcaattaatatggatttagtggatgcacaacaagcaagacgtatacttgatcgtcttgttggttacaatattagtcctttattatggaagaaagtaaaaaaaggattaagtgcaggacgtgtacaatctgtagcagttcgtttaatcatcgagcgtgaaagggaaattcaaaactttgaacctgaagaattctggacaattaaaacagaatttgtaaaaggaaaagacacatttgaagcaagcttttacggtgtagatggtgaaaaagttcaattaacaaatgaaacgcaagtgaatgaaataattgaacagatgaaagacaatgcgttttcagttgaaaatgtaacgcgcaaagagcgaaaacgtaaccctgcattaccgtttacaacatcttccttgcaacaagaagcagcccgtaagttaaacatgcgagcaaagaaaacaatgatgcttgcacagcaattgtatgaagggatagatcttggaaaacaaggaactgtaggtcttattacgtatatgagaactgattcaacacgtatctcagaaacagctcaaacagaggctcgtacttacatcactgaagcgtatggtacggaatacataggaacagaaaagaagaaagaaacgaaaaagtcaaatgcacaagatgcgcatgaggcaattcgtcctacttcggtaatgagaaagccagaggaactaaaaagtttcttaggtcgtgatcaacttcgattatataaattgatttgggagcgatttgttgcaagtcaaatggcgtctgctataatggatactgtgacagcgagactcattaataacaatgttcagttccgtgcaagtggatcggttgtaaagttcccgggatttatgaaagtgtatgtagagtcaaaagatgatggtgctgaagaaaaggataagatgttgccgcctttagaagtaggggaaactgtattttcaaaggatttagaaccaaagcaacattttacacaacctcctccgcgctatacagaggctcgcctagtaagaacacttgaagaacttggaattggaagaccgtcgacatatgtacctacacttgaaacgattcaaaagcgtgggtatgtaggcttggataataaacgcttcgttccgactgaacttggtgaaatagtaattgaacttattttagagtttttcccagaaattattaacattgaatttactgccaatatggagcaaagccttgatgaagtagaagaaggaaatgcgaattgggtaaaaattgttgatgatttctacgtaggttttgaaccgcgtttagaaaaagcggaaaaagaaatgcgtgaagtggaaattaaagatgaaccagctggggaagattgtgaattatgtaatcacccaatggtctttaaaatgggtaaatacgggaaatttatggcttgctcgaatttcccagattgtcgtaatacaaagccgattgtgaaagaaatcggtgttacttgtccaaagtgtgataagggtcaaattattgaacgccgtagtaataaaaagaaacgtcttttctatgggtgcggtacgtatccggaatgcgactttgtatcttgggataagccaattggtcgtaagtgtccgaagtgcgaaggcatgcttgtagagaaaaagttgaaaaaaggcgtgcaagtacaatgtatttcgtgcgattatgaagaagaacaacaaatgtgagcgtaactgctcacatttttttcgggaagaaaaggaaaggtgatataaatgacaacacaagtagtaaacgtcattggcgcaggtcttgcaggaagtgaagcagcttatcaaattgcaaaacgtggtgtccaagttagattatatgaaatgagaccggtaaggcaaacgccagctcatcacacagataaattcgctgaattagtatgtagtaactcacttcgtgcaaacactttaacaaatgcagttggagttattaaagaggaaatgcgcttaatggattctgtaattattcgtgcggcggatgagtgctctgtaccagctggaggcgctttagctgtagaccgtcatgagttcgcagctaaagtaacagaatacgtaaagaaccatccaaatgtaactgtaatgaatgaagaaattacagatattccagagggaccgacaattattgctacaggtccattaacatctcctgatctttctgcaaaattgaaagaattaacaggagaagattatttctacttctatgatgctgcagccccaatcgtagaaaaagacagcattgacatgaataaagtatatttaaaatcgcgttatgacaaaggtgaagctgcatatttaaattgcccaatgacagaagaagagtttgatcgtttttatgaggctctaattgctgctgagacagtgcctttaaaagagtttgaaaaagaaattttctttgaaggttgtatgccagtagaggttatggcaagtagagggagacagacgttagtatttggacctatgaaacctgttggattggaagatccaaaaacagggaaaacgccatatgctgttgttcagttacgtcaagatgatgcagcgggaactttatacaatatcgtaggtttccaaacacatttaaagtggggaccgcaaaaagaagtgttacagttaattccaggattagaaaatgcagagattgtacgttatggtgtaatgcatcgtaatacgtttattaattcacctaatttgcttcgtccaacatatcaatataaacaacgggatgatttattcttcgctggtcaaatgactggagtagagggatatgttgaatcggcagcatcaggattattagcaggaattaatgctgcgcgtcttgtgcaaggtgaagagccagttgtattaccgccagtaactgcgatgggtagcatggcaaattacattacggcaacgaacgctaaaaacttccaaccgatgaatgcgaacttcggtctatttgcaccgttagagaagaagattaaaaagaaagcagaacgaaatgaagcgtacgcagcacgagctttagaaacgattcgaaattttgtaaatatttagttaaatttcttgcaaaggctactaagttgtgatacgatttagtagcctttattgaggtgagttgtgtgaatgtgaagaaattgttacaattattcgttggatatttacaaattgaaagaaattattcaaaatatacaattgcaagttatcaaaatgatttagaacattttgtgcaatttatggaacgagaaggcatatcctcttttttagacgttacatacgcggatgttcgtttgtacttaacgacgttgcacgatgagaagttagcccgtaaatctgtcgcaagaaaagtatcaagcttacgaagtttatatcgttttttgatgcgtgaaggttatcgaaaggataatccgtttgcacttgcgtcactccccaaaaaagaattgtcaatcccaaagtttttatatgctgaagagttagaggaattatttgaagtttctgacacagaaacaccattaggtcaaaggaatcaagctttgttagagttgatgtatgcgactgggatccgtgtgagtgaatgtgtcaatttacaacttaccgatattgactttgcggtgggaacaattttagtaatgggaaaaggaaaaaaacaaaggtatattccgttcggaagctatgcgcaagattctttaattacttatatagagaatgggagaaaacagttagttaataagactgacgaagactctcatatggtatttttaaatgcgaaaggtaaaccgctaacaagtcgtggagttcgttatgttttaaatgaactcattaaaaaggcttcgctgacaatgcggataagtccccatatgttaaggcatacatttgctacacatatgctagatgaaggggcggatttacgtactgtacaggagttattaggccatgaaaatttgtcgacgacacaaatttatacgcatgtctctaaagaaagattgcgttctgtttacatgaagcatcacccgcgggcataaattgctttaaaagctataaaaacaaataaaggagttttttctatgggaaatttccacgctacaacgatatttgcagttcatcataatggagaatgtgcaatggctggagatggccaagtgacaatgggaaatgctgttgtaatgaaacatacagctcgtaaagttcgtaaacttttccaaggtaaagttttggctggtttcgcaggatcagttgctgacgcatttactctttttgaaatgtttgaagggaaattagaagagtataatggcaacttgcagcgtgctgctgttgaaatggccaaacaatggcgtggcgataaaatgttacgtcagctagaagcaatgctcattgtcatggataaaacaactatgctccttgtttcaggtacaggagaagtaattgaaccggatgatggtattttagcaattggatctggtgggaattatgcactttctgcaggtcgtgctttaaagcaatatgcaagtgaacacttaacagcgaagcaaattgcgaaagcgagtttagagattgctggcgatatttgtgtttatacgaatcacaacataattgttgaagaattgtagaatcgtaagggaggcattttatatgcatttacattttactccgcgccaaattgtggaaaaattagatcaatacatcatcggtcaaaaagacgcaaagaaagcggttgctgtagcgttgagaaatcgatatcgtcgcagtaaattagctgaaaatttacgtgacgaaattgcacctaaaaatatcttaatgattggaccgacaggtgttgggaaaacagaggtagcacgacgaatggcgaaactcgttggagcaccttttattaaggttgaggctacaaaattcacagaagttggatatgtgggtagagatgtagagtcgatggtacgtgacctagtggaaacatcggttcgtatcgtaaaagaagaaatggtagtgaaagttcaagataaagccgaagagcaagcgaatcaacgtcttgttgaaattttagtgccgagtccagagaaacaatctggattcaaaaatccattagagatgctttttggaggcactcaaaattcgaatcaaacgtctgatacacaagaagatgttgaaatcgaaaagaagcgtcaagatgtggagagaaagcttgctgcagggcttcttgaagacgaaattgtatcgattgaagtgactgaacaacagtcttccatgtttgatatgttacaaggaactggcatggagcaaatgggaatgaatttccaagatgcgctaggaagttttatgccgaaaaaaacgaaaaaacgtaaactttctgtaaaagaagcaagaaaactcttgacaaatgaagaggcacagcgcttaattgatatggatgaagttacacaagaggctgtttatcgtgctgaacagctcgggattatttttatcgatgaaattgacaaaattgctggtaagcagtcgaatagcgtagatgtatcacgtgaaggtgtgcaacgtgacattttgccgattgtagaagggtcgaatgttgcgacaaaatacggatcagtaaaaacggattatattttattcgttgcagctggagcgttccatatgtctaaaccgtcggatttaattccggaattgcaagggagatttccgattcgagtagaattaacaaaattatcgacagacgattttgttaaaatactaatcgagcctgacaatgcgttaattaaacaatatatggcattattagcgactgaaggtatagaaattgaattttcagacgaagctattcgtaagattgctgagattgcttatcaagttaatcaggatacagataatattggagcaagaagacttcatacgattatggagaagctccttgaagatttatcgtttgaagcatctgaaattacgttagagaaaataacgataacacctcaatacgttgaggagaaattagcaacaattgctaaaaataaagatgtgagccagtttattttgtaatagtgtcatcaggtgactcgccctagtttccaagtgatgaaaaaatatgtgagtaacatgtaggaggaacttttgaaatggaattattagcaaaaacgagaaaattaaatgcgttattacagagcgcagcagggaagcctgtaaactttagagaaatgtctgacacaatgtgtgaagtaatcgaagcaaacgtattcgtagttagccgtcgtggtaaattactaggttatgcaattcaccaacaaatcgaaaacgaacgcatgaagcaaatgcttgcagaacgtcaattcccagaagaatatacacaaagcttattcaacattacagaaacatcttcaaacttagatgtgaacagtgcttacacagcattcccagtagaaaacagagaattatttggtcaaggtttaactacaatcgtaccaatcgttggtggcggtgagcgtctaggtacattagtattagctcgtcttggtcaagagttcttagatgatgatttaatccttgctgagtacagctcaactgttgtaggtatggaaattttacgtgaaaaagcagaagaaatcgaagaggaagcacgtagtaaagctgttgttcaaatggcgatcagctcattatcttacagtgagttagaagcgattgagcacatcttcgaagaattaaatggaacagaaggtttacttgttgcaagtaaaattgctgatcgcgtaggaattactcgttctgtaatcgtaaatgcactacgtaaattagaaagtgctggtgttattgagtctcgttctttaggtatgaaaggaacatacattaaagtgctaaacgacaagtttctacaggaacttgctaaattaaaaacaaactaatttgtaaaaaactctcctcgattgaggagagttttttatgtgcaatggatagatggtgcttgtgaaaagtgtcataagcgtgttttctgagaaaactattaattgtatttatttttttgcttaaaagaaatgaaggttggtaatactggaattcgagtatgaacaaagaaagttttacattgttcgcattttcgacttgattgtaatatttcagtatgatatagtaagcagtggtgtcagtacaaagtacacacgtttactgatttaagtgttggtgctacgtttgtagtttcgcttagagatgaagtaaacggaggatatcaaaaaccatttaggaggaactatattatgtcagtaatttctatgaagcaattgcttgaagctggtgttcatttcggacatcaaactcgtcgttggaacccaaaaatgaagcgttacattttcacagagcgtaacggtatctacatcatcgacttacaaaaaactgtgaaaaaagttgaggaagcttacagaacgatgcgcgacatcgctgctgaaggcggagacatcttattcgtaggtactaaaaaacaagcacaagaagctattaaagaagaagcaactcgtgctggtatgtacttcgttaaccaacgttggttaggcggaactttaacaaacttccaaacaatccaaaagcgtatcaagcgtcttaaagacatcgaaagaatgcaagaagatggtactttcgaagtacttcctaagaaagaagttgttcaacttaaaaaagagttagagcgtcttgagaaattcttaggcggtattaaagatatgaaaggtcttccaagtgcattattcgtagtagaccctcgtaaagagcgtattgcagttgctgaagcacgcaaattacacattccaatcatcggtatcgttgatacaaactgtgatccagacgaaatcgatcacgttatcccagcaaacgatgatgcaattcgtgctgtaaaacttcttacatctaaaatggcagacgcgatccttgaagcaaaacaaggtgaagaaactgttactgcgtaacaaagttggaaaggtgataaggggttcggccttttatcaccttttttaaggtataaacacctttataaaaggtataaatacatattttaggaggatgaaaagtatggcaatcactgctcaaatggtaaaagaattacgtgaaaaaactggcgcaggtatgatggactgcaaaaaagctttaacagaaactaacggcgacatggagaaggcaattgacttcttacgtgaaaaaggtattgcgaaagctgctaaaaaagctgaccgcattgctgctgaaggtttaactttcatcgaaacaaacggtaacgacgctttaatcttagaattaaactctgaaactgatttcgttgcgaaaaacgaaggtttccaaacactaattaaagaattagctgctcacttattaactaacaaaccagctaacgttgaagaagctatggctcaaacaatggaaaacggtaaaaaagttgaagagcacatcaacgaagcaatcgctaaaattggtgaaaaacttacacttcgtcgtttcgaaatcgtatcaaaaactgatgcagatgcattcggcgcttacctacacatgggtggacgcattggtgtattaacagttcttgaaggttctactgatgaagctgctgctaaagatgttgcaatgcacatcgctgcagttaaccctaaatacatcgaccgcgatgctgtaacagctgaagaagttgagcatgagcgtcaagtattaacacaacaagcattaaacgaaggcaagcctgagaaaatcgttgcaaaaatggttgaaggccgtttaggcaaattcttcgaagagatttgcttacttgaccaagcattcgttaaaaaccctgatatgaaagttcgtcagttcgttgagtctaaaggcggaacattaaaaggattcgttcgctacgctgttggtgaaggtatcgaaaaacgcgaagacaactttgctgaagaagtaatgaaccaagtaaaaggtagcaactaatacagattagggaacacattgtgttcccttttttaaaataaagatgtaagcaattggaggttcattatgagtaaaccgaaatataatcgtgtcgttttaaagctaagtggagaagctttagctggagagcaaggatttggaattaacccaactgttattaagtcagttgcggaacaagtaaaagaaattgcagaacttgatgtagaggttgctgttgttgttggtggcggtaacatttggcgtgggaaaattggaagtgaaatgggcatggatcgtgcaggggcagattacatgggcatgttagcgacagttatgaattcattagctcttcaagatagcttggagaatatcggaattcaaactcgtgtacaaacttcaattgagatgcgtcaagttgcagaaccttacattcgtcgtaaagcagttcgtcacttagagaaaaaacgtgttgttatctttgcagcaggtacaggtaacccatacttctctacagatacaacagcagcattacgtgcggcagaaattgaagcagatgtaattttaatggcgaaaaacaatgtagatggtgtatataatgcggatccatctattgatccaacagctacgaaatatgaaacgcttacttacttagacgtattaaaagaaggtttaggtgtaatggattctacagcttcttctctatgtatggataatgatattccattaattgtattctcagttatggaaaaaggtaatattaaacgtgccgttttaggcgaaaatatcggaacagtggtaagggggaaataaatatgggacaacaagtattgaagtcttcaaatgaaaaaatggaaaaagcagttgctgcttattctcgtgaattagcaacagttcgtgctggccgtgcaaacgcgtctgtattagataaggtacaagttgattactatggtgcaccaacaccagttgtgcaattagcgaacattacagttccagaagcgcgtttactagtaattcaaccttatgataaaacttctatcggtgatattgaaaaagcaattttaaaagcagatttaggcttaaatccttctaatgatggaactgtaattcgtattgcattccctgcattaacagaagaacgtcgtcgtgatcttgtaaaagttgtgaaaaaatatgctgaagaagctaaagttgctgttcgtaacgtacgtcgtgacggaaatgatgatcttaagaagcttgaaaaagctggcgagattacagaagatgatttaagaggatatactgaagatatccaaaaagaaacagataaatatattgcaaaagttgacgaaatcgcaaaaaacaaagaaaaagaaatcatggaagtgtaatagcgataacttcgcaattatgaccctcttcttaagggggtctttttacacttttaggcatacgtctgcttgctggagggtatgaatgatgtttaaaaactttcctttttttaaaggtaaaaaggacacatcgtttgatcatctcgttgaagaagtgaaaaaaggatatatcccagaacatattgccatcattatggatgggaatggaagatgggcaaagaggagagcaatgcctcgtattgcgggacatcatgaaggtatgcaagttgtaaagaaaattacaaaatttgcaagtaaacttaatgtgaaagtgttaactctttatgctttttcaactgagaactggaaaagaccgaaaaaggaagttgattatttaatgaagcttccagaagaatttctaggtacatttttaccagaattgattgaagaaaacgtacaagtccgagtaatagggcaaaaagatcgtcttcctacgcatacacgcagagcgatggagaaagccatggaagatacgaaagagaatacgggattaattcttaatttcgcgttaaactatggaagtcgagatgaaatcgtttctgctgtgcaacatatgatgaaagataatgaggaaggaaaaattcgttctgaagaggtaagtgaagaaatgctttcctcctacttaatgacgagttctttacctgatccagagttgttaatccgaacaagcggagagctacgtattagtaatttcatgttatggcaaattgcatattcggagttttggtttacagacgtgtattggccagacttcaaagaagaacatttgctaaatgcgattactgactttcaacatagagggcgcagattcggaggcgtgtagaaagagagggtttggtagtgaaacagagaattattactggagtggttgctgccgcgctattcattcccatcgtaatatacggtggcgtgccttttacggttttagtgtatgcacttgcttctataggtttatatgaattaattcgtatgaataagcttacgcttatttcagtaccgacagttttagctgcagtattattgtggattcttttaattccaagtagtgcatcagaactgtttacatggattggattaggtaaattggaaatcacatttgtgattgttttattacttttatcatatacagtcctttctaagaatacatttacttttgataatgcttcatttttactgatggcaacgacatatgtggcaatgggattcttatatttaaatgaaacgagaatattaggaattaaatatgtattttgcgcattatttgttatatgggctactgattcaggcgcatatttcgtaggaaaagcattgggcaagagaaaattgtggccagaaatcagtccaaataaaacgattgaaggttcattagggggcatcgtttgtggaattattgtggcacttgtttacaacgtgttcttcccagtcgaatcgaatgtagtaattttaattgtgctgacaattattatttctatttttggacaaattggtgatttagtacaatctgcttttaaacgtcattatggcgtaaaggattcaggtacaattttacctgggcatggtggtatattagaccgaacagatagttggttattcgttttaccaattctctacttcttattacaatataattaataaatgaacgaggggttggagtcatgaaaaacattagtttattaggtgcaagcggatcaattggtacacaaactttagatgtattacgctcgcacccagaccaattccgtctcgttgctttttctgtagggaaaaatattgactacgcagtaaaggtaattcaagaattttctccgcaaatcgtctctgtgcaaagagaagaagatgttttaaaattacaatctgtttcaggtaatacaaaaattgtatatggtagtgaaggacttttagaagtagcactacatccagatgcggagattgtagtaaatgctgttgtaggtagcgtagggttgttaccaacacttcgtgcaattgaggcgaaaaaaacaattggaattgcaaataaagaaacgttagtaactgcaggacatcttgtaatggaagcagcacgaaaacataatgtttcgttacttccagttgatagtgaacattcggctatttttcaatgcttgaatggtgaaaatgaaaaaagaatttctcgtcttattataacggcttctggtggaagtttccgcgataaaacgagggatgaattgcatcatgtgaccgtagaagatgcgcttcgacatccaaactggtcaatgggttcgaaaattacaattgattctgctacaatgatgaataagggactagaagtaattgaagcacattggctttttggtattccttatgagcaaatcgatgttgttttacataaagaaagtattatccattctatggttgaatttgaagatcgtagtgtaatggcgcagcttggttcacctgatatgcgagtaccaattcaatacgcacttacatatccggatagattgcctctttcagacacaaaacagttaaacttatgggaaatagggacgttgcattttgagaaaatggaccaagaacgattccgttgtttacgttttgcgtatgaagctggaaaagcaggtggaagtatgccagctgtaatgaacgcagcgaatgaagtagctgttgaagcctttttacaaaagagaattgatttcttaacagtggaagacctcattgaaaaagcaatgaaccatcacaatgtcattgcacgaccgagcttagaggaaattttggaaattgatgcggccacaagacggtttgtgatggaacaaatttagcaaaggtggttatggaattgaatacagcgattgcctttatattaattttcggtgcactcgtatttttccatgagctagggcatctatatttcgcaaaaagagcaggtattttatgccgcgagtttgcgattggttttggtccgaaaatattctcatttgaaaagaatgaaacggtgtatacgattcgattactgccccttggtggctatgtaagaatggctggcgaggatgcggacacagttgagttaaagcctgggaaaaaggttggccttgtattaaatgaaaaagacgaagttgtgaaattagtttttgatggatatgaaaagtatccaaatgttcgtgttattgaagtcgaacaagctgatttggagcataatttaacaatttcgggctatgaagagtacgaggaagagcttcaaacattccgagtgaatgaaaaggctcgtattattactgcgggggaagaaattcaaattgccccgtataatagacaatttggctcgaaaaaactagggcaacgcgctttaacaatctttgcgggtcctgcaatgaacttcattttagcatttgttatttttgtgattcttggatttgtacaaggggttcctgttgacaaaccaatggtcggaaaagtgatggataacagtgcagcacagcaagctggattgaaagagaatgatacaattcaagctattgatgggaaaaacacaagtacatggaaagatgttgttactattgtacgtgaaaacccaaataaagaaattacgttacaagtaaagcgtgataatgaacagtttaatgtgaaagtaacgccaacactcgataaagaaggtaaagaagaagttggtagaattggtgtctactctcctgtagagaaaacagtgatgggttctattaaatcaggttttgaacaaacgtaccaatggacgaaactaatttttgagtctcttgtgaaattagtaactggtcaattttctattaatgagttgtcaggtccagtaggaatttataatctaacagatcaagttgtagattatgggtttacgcgtgtactaagtttagctgcagttctaagcattaatcttggtttatttaatttattaccagttcctgctttagatggtggccgtttattcttcttcttaattgaagcgttacgagggaaaccaattgatcgccaaaaagaaggaatggttcactttattggttttgcattattaatgttacttatgttagttgtaacttggaatgacattcgtaagtttttcttgtaaaataaagtgaaacttataatgaaatagagctcgtagaataaaatccctcacctaactcgaggtgaggggttttactgcgtgtaagagtaaaatgaagaggtgcaaataaatgaaacaaagtatggtattcagtcctacattacgtgaagttccagctgatgctgaaattaagagtcatcagctattacttcgtgcaggttttatgcgtcaaaatgcttctggtatttatagctttctaccatttggattaaaagtattacacaaagtagaacgtatcgttcgagaagaaatggagcgcgcaggagctgtagaattattaatgccagctatgcaagctgcagaattatggcaagaatcaggtcgttggtattcttacggatctgaattaatgcgtatgaaagatcgtaacgctcgtgaattcgcattaggagcgacacatgaggaagtaattacggatcttgtgcgtgatgaagtgaaatcatataaaaaattaccgttaacattataccaaattcaaacaaaattccgtgatgagcaaagacctcgtttcggcttattacgtggaagagagtttctaatgaaagatgcctactctttccatgctacacaagagagcttagatgaagtatacgatcgcttatataaagcatactctaacatttttactcgctgtggcttgaatttccgtgcagttattgctgattctggagcaatgggcggaaaagatacacatgaatttatggtattatctgatgttggtgaagatacaattgcatactctgacacatctgattatgcagcaaacatcgaaatggctcctgttgtagctacgtatacgaagagtgacgaagcagaaaaagcacttgaaaaagtagcaacaccagaccaaaaagcaattgaagaagtatctgcattcttaaacattgcagctgacaagtgcattaagtctatggtgtttaaagtagatgagaaattagtagttgtacttgttcgtggtgatcacgaagtaaacgatgtgaaagtgaaaaatgtatatggcgcttcagttgttgagcttgcttctcatgaagaagtaaaagcattattaaattgtgaagttggttcattaggaccgattaatgtaacaggtgatatcgaaattattgctgatcacgctgtagcatcaattgttaacggatgttcaggagcgaatgaagaagggttccattatgtaaatgtaaatccagaacgtgactttaaagtaagtcaatatacagatttacgctttattcaagaaggagaccaatctccagatggaaacggaacaattcttttcgcacgcggaattgaagttggtcatgtattcaaattaggaactcgttatagtgaagcaatgaacgcaacattcctagatgaaaatggaaaaacacaaccacttattatgggttgttacggtatcggtgtatctcgtacagtagcagcaattgcagagcaatttaacgatgagaacggcttagtttggccaaaagcggtagcaccgttccatgtgcatgtaattccagtaaatatgaaatctgatgcacaacgtgaaatgggtgaaaatatctacaactcattacaagaacaaggctatgaagtgttattagacgatcgtgcagaacgtgcaggtgttaaatttgcagatgcagatttattcggtcttccagttcgtgttacagttggtaaaaaagcagacgaaggtattgtagaagtgaaagtacgtgctacaggtgagtctgaagaagtaaaagtagaagaacttcaaacatatattgcaaatattttaaaataagaagaggtacctcgtaatggggtaccttctctttctttgtaaacgtattttgtaaaagaagaggtgagaaatctttctttgtggtacgtttcaatttataatagcaaatggaaggagagtgcttatgtctttaacaaatgaacaacaagagcgatttcaaattttgctccagcagttgcaaataccagacgaccttataaatcaatatttacaaggcggtggtattgaaaggctcgttattgataaagcgaataaaagttggcattttgatttacaagtgccacgtattttgcctacagaattatatgaattgctagaaacaaagcttaagcaatcattttctcatattgcaagaacaacatttgcattagaaacagagaataaacaatttacagaagaagaagtgagggcgtattggccgctttgtacggaacgaattacattttcacctatgttcgcatacttaaagaagcagcttccacaggtgaatggagtgaagttgttaataaatgtaaataacgagctggagtctacggctttaaagaaaaacgttgcgaaaccagtaggggatcaatacgaagtttttggattcccgcgttttcagttagacacacatatacagcaaaatacagaagaaatgcaaaagtttcgtgaacaaacgcagcaagaagaccgtgagcgtgttatacaagctatggaagaaatggcgaagaagcaagctgaagaaagcagcgttgtgtatgaaggaccgattacactcgggtatcttattaagccagatgaagagattacaccgatgcgagaaattcaagatgaagaaagaagaaaaacggttcaaggatatgtcttccatgtagaaacaaaagagcttcgtagtgggcgtacgttattaactttaaaaataacggattatacggattctattatgatcaaaatgttctcgcgtgacaaagaagatattccaatgctgcaatccttgaaaaaaggaatgtgggtgaaagcgcgtggttctgttcaaaacgatacattcgttcgagatttagtaatgattgcaaatgatattaatgaaataacaggaccgtctcgtaaagataaagcaccagaaggcgaaaaacgagtagagctgcatctccatactccgatgagtcaaatggacgctgtcactccagtttctaagcttgttgctcaagctggtaaatggggacatgaggctattgcggttacagatcatgccgtggctcagtccttcccagaggcgtattctgcagggaagaaggctggtgttaaagttatatatggtgtagaagcaaatctagttaatgatggtgtaccgatagcgtataacgaagcgcatcgtttacttgcagaggaaacgtatgttgttttcgacgttgagacgacaggtttatcagctgtatacgatacagtcattgagttggctgccgtaaaagtaaagggtggcgaaattattgatcgctttgaatctttcgcaaatccacatcaaccattatcagcgacgattattgaattgacaggtattacggatgatatgttaactgatgcacctgaagtggacgaagtgtttaaaaagtttgaggaatggatgggcgaccatacacttgttgcccataacgcgagctttgatatgggctttattaacgtaggttttaaaaaggctggactagaaaaaacgaataatccagttattgatacgttagaacttgcacgatttttattcccagaaatgaaaaatcatcgattaaatacgatgtgtaaaaaacttgatattgaattaacacaacatcaccgtgcgatttatgatacagaagcgacgggatatttacttgtgaaaatgttgaaagacgtaattgaaaagggatttgaatatcacgatcaattaaatgatagcatgggacaaggggatgcgtataagcgtggccgtccaagtcatatgacgttacttgccacatcagatgttggattgaaaaatttatataaacttgtttcatattctcaccttaattacttttaccgtgtaccacgtgtgccgagatcactattaaaaaaatatcgtgaagggattttagtaggaacggcttgtgataaaggtgaagtgtttgaggcaatgatgcaaaaggcacctgaagaggtagaagaaattgcccagttctatgattacattgaagtaatgcctccagaggtgttgcgtcatttagtagaacgtgagcttgttcgagacgaaggtcaattaaaaacaattatttctaacttagtaaaactaggtgagacgttagataaaccagttgttgctacaggaaacgtgcattatttagaccctgaggatgcgatgtatcgtaaaattttagtcagttcgcagggcggagccaatccgttaaatcgacattcattaccgccagtacatttccgtacaactgatgagatgttagaatgtttttcattcttaggtgaagacaaagcgaaagaagttgttgtaacaaatacacaaaagattgcgtcattaattggtgatgtgcatccagtaaaagacgatctatacacaccgaaaattgaaggtgctgatgatgaaacgcgtgatatgagttataaaatggcgcgtagcatttatggtgaagagttaccggaaattgtagaagcacgtttagaaaaagaattaaaaagtattattgggcatggattcgccgtaatttatttaatttcacataagcttgtgaaaaaatcgttagtagacggatatctagtaggttcgcgtggatcggtagggtcatcatttgttgcaacgatgatggaaattacagaagtaaacccattaccaccacactatgtatgtccgaagtgtaagcaatcagaattctttaatgatggttctgtaggttctggttttgacttaccagataaagaatgtcctgcttgtaatattccatatgtaaaagatggacatgacattcctttcgaaacgttccttggatttaaaggagataaggtgcccgatatcgatttgaacttctccggggaataccaaccacgtgcccataactatacgaaagtactgttcggtgaagactatgtatatcgtgcaggaacgattggtacagttgcggaaaaaactgcttacggatatgtaaaaggttatgcaaatgatcataacttaacgattcgaaatgcagagattgatcgcttagtagcagggtgtaccggtgtaaaacgtacaacaggacagcatccaggcggtattatcgttgtgccagattacatggatatctttgatttctcaccaatacagtacccagctgattcaattggtgctgaatggagaacaacgcattttgatttccactcgattcatgataatttattaaaacttgatatactaggacacgatgatccgaccgttattcgtatgttacaagatttaagtggtattgatccgaaaacaatcccaacggatgatccagaagtaatgaaaattttctctggtccagaatcgttaggggtaacggaagagcaaattaactgtaaaacaggtacacttggtataccagagtttggtacaaaattcgtaagacagatgttagaagagacaaaaccgacgacattctcagagttagtccaaatttctggactatcacatggtactgacgtatggcttggtaatgcaaacgagttaatttataacggtacatgtacgctgagcgaagttatcggttgtcgtgatgacatcatggtatatttaatctatcaaggtctagatccatcattagccttcaaaatcatggagtcggttcgtaaaggtaaaggtgtaccggaagaatgggaagaagacatgaaaaataataatgtaccagattggtatattgattcatgtaagaagattaaatacatgttccctaaagcccatgcggctgcttacgtacttatggctgtacgtatcgcatactttaaagtacattttgcactgttattctatgccgcatattttacagttcgtgcagatgattttgatgtagaggcaatggcgaaaggttcagcatctatacgtgcaagaattgatgaaattgctcaaaagggactcgatgctgcgccgaaagagaagagtttattaacagtactagaaatgacacttgaaatgtgtgagcgtggatactcattccaaaaggtggatttataccgctcacatgcaacagaatttattattgatggagacacattaattcctccatttaatgcggtacctggtcttggtacaaacgcagctttaagtattgtggaagcacgtaaaaatggagacttcttatcaaaagaggacttgcagcagcgtagtaaggtttcgaaaacaattattgagtatttagatagtcaaggttgtttaggagatttaccggatcaaaaccagttatcactgttctagtaggtaggaaaagtctttgcaaatcaacatttcctatgatatactattaaccgagataaccatgtcatgtatattgtgtaaagaaaagagtggggaaacccactctttcgtgttactatctatgttttctctacgtagataggtaaaagatttctgtcgtatatacatattttgttacaagttttacttcttaaatttggtaatactaagacagataatccctgctgaacagcaggggcttttgttagctaacgagaaagaataagatagaccgtttttaaagtggcggggtcttcttcttttaaatggtacatgacggcaggaaggaggctgtttatggataagaaagtcacagaagttgtagaagcatttgcgcagccgatcgttgaagagttaaatcttgaacttgtagatgtagagtatgtgaaagaaggacaagactggttcttacgcgtattcatcgattctgaaaagggagtcgacattgaagaatgcggtgcggtaagtgaacgtttaagcgaagctttagataaagaggatccaattcctcatctttactttttggatgtatcatctcctggagcggaacgcccattaaagaaagaaaaagacttccagcaagcggtaggaaaacaagtggcaattaaaacatatgagccgattgatggtgaaaagatgtttgaaggaaaactgctttcttacgatggtacaacaataacattattattaacaattaaaacacgtaaaaaagaaatccaaatttcgatggataaagtcgcaaatgcgcgacttgctgttacgttttagttagaagggggatcttcatgagcactgagttattagatgctttgctcgtattagaatctgaaaaaggcattagcaaagacattattattgatgcgattgaagcagctttaatctctgcttataagcgcaattttaatcaagcacaaaacgttcgtgtgagctttaacccagaagtgggaacaattcaagttttagcacgtaaagacgtagtagacaatgtgtttgatccacgtcttgaaatttctgtagaggaagcaagacaaattaatccaaactaccaagatggtgacgtactagaaattgaagtaacaccaaaagactttggtcgtattgcagcacaaactgcaaaacaagttgtcacacaacgagtgcgtgaagcagagcgcggtgttatttactctgagtttagtgaccgtgaagaagatattatggtaggtattgtacaacgtcaagatgctcgtttcatctatgtaagcttaggaaaagtagaagctttattacctgtaagtgagcaaatgcctaatgagcaatacaaaccacatgatcgtattcgcgtattcattacgaaagtagaaaaaacgacaaaaggaccacaaatttacgtatcacgtacacatcctggtcttttaaaacgtttattcgaaatggaagttcctgaaatctatgatggaactgtagaaattcgttctgtagcacgtgaagctggcgatcgctctaagatctctgtatatgcagagaacactgatgttgatccagttggttcttgtgtaggaccaaaagggcaacgtgtacaacgcattgtagacgaattaaaaggtgaaaaaattgacatcgtccgctggtcaaatgatccagttgaatatgttgcaaatgcattaagcccatcacaagttgttaaagtacttgtagatgaagaagaaaaagcgacaacagtagttgttccagaccaccagttatcattagctatcggtaagcgtggacaaaatgcacgtcttgcagctaaattaacaggctggaaaattgatattaagagtgagtctgatgcgaaacaacttggtattgtaacagaagaagatagcgtaatcgcatttggattcgattcagtggaagacgaaatcgaatagaggtgatgagtatgagcaatcgaaaagttccgttacgaaaatgtgttgcaacgcaagaaatgaaatcaaaacgagagctcgttcgcattgttcgttccaaagagggagaagtgtccattgatttaactgggaaaaaatcaggacgaggtgcttacttgtcgaaggacaaggagagcattcttcaagctcaaaagaaaaatgttttggaacatcatctaaaagcgaaaatcgacggttctttatatgaagagcttcttgagcttgttgagaaggagtcgaaataagtgtccgattggaaatcgtttttaggactagcaaaccgggctcggaaaattatttcgggtgaagaactcgttttaaaagaagtacgaagtggcaaagcaaaacttgtattgctatctgaagatgcgtcagtaaatactacaaaacgcatcacagataaaactacgtactacaacgtaccaatgagaaaggtcgaaaatcgacaacaattagggcatgcgattgggagagatgagcgagtcgttgtagctgtgttagatgtaggctttgcgaaaaagctgcgtagcatgctcgatacaaattaccgggggtgaaggtatgagtaaaattcgagtgcatgaatatgcaaaaaaacataatatctcaagtaaagatcttatgacaaaactaaaagaaatgaatatcgaggtttcgaatcatatgacaatgttagacgatgaagtagtaaataaattagataatgaatatcaaactgaaaaaccttctgttgcagatgagtttgaagtagaagaaaaagttgttcgcagtaaaaagaacagcaataagaaaaagaaaaaaggcaaaggaaacgaagacaaacgtcaagagaactttgctggtagacaacaaactcaaattgtagaaacaccagataaaattactttctctggaagccttacagtaggagatcttgctaaaaaattaagcaaagagccatctgaaattattaagaagctcttcatgcttggaattatggcaacaattaaccaagacttggataaagatacaattgagttaattgctaacgactacggtattgaagtagaagaagaagtaattgtaagcgagactgagtttgaaacattcattgatgagcaagatgatgaagagaacttaaaagaacgtccagctgtagttacaatcatgggacacgttgaccatggtaaaacaacattactggattctattcgtaactcaaaagtaactgcaggcgaagcgggtggaattactcagcatatcggtgcatatcaagttgaagtaaacgataagaagattacattcttagatacacctggtcacgcagcatttacaacgatgcgtgctcgtggagcacaagtaacggatattacaatccttgttgttgcagcggatgacggtgttatgccacaaacggttgaagcaattaaccatgcgaaggcagcaggagtaccaattattgttgctgtgaataaaatggataaaccagctgcaaaccctgatcgcgtaatgcaagaactaactgaatatgaattagttccagaagcttggggcggagatactattttcgtaccaatttctgcaattcaaggcgaaggcattgacaacttactagaaatgatccttcttgtaagtgaagtagaagaatataaagcaaatccaaaccgctatgcaactggtacagtaatcgaagcacagcttgataaaggtaaaggaactatcgcgacattacttgttcaaaatggtacgcttcgagttggagatccaatcgttgttggaacttcattcggacgtgttcgtgcaatggtaagtgatattggtcgtcgtgtaaaagttgctggtccatcaactcctgttgaaattactggtttaaacgaagtaccacaggctggagatcgtttcatggcatttgctgatgagaagaaagctcgtcaaattggtgaatcacgtgcacaagaagcgttagttgcacaacgtggtgagaaatctaaattaagccttgaagatttattccaacaaatccaagagggcgatgtaaaagaaattaacttaatcgtaaaagcagacgtacaaggttctgttgaagcgatggcagcatcacttcgtaaaattgatgttgaaggcgtaaaagttaaaatcattcacactggtgtaggtgcgattacagaatctgatatcattttagcttctgcatctaatgcaattgtaattggatttaacgtacgtccagatgtgaacgcgaagcgtacagctgaattagagaacgttgatattcgtttacaccgtattatttataaagtaatcgaagagattgaagcagctatgcaaggtatgcttgatccagaattcgaagaaaaagtaatcggtcaagcagaagttcgtcaaacgtttaaagtaacaaaagttggaacaatcgcaggttgttacgtaacagacggtaaaattacgcgtgatagtggcgtacgtattatccgtgacggcgtagtaattttcgaaggacaacttgatacgttaaaacgtttcaaagacgacgtaaaagaagttgcacaaaactatgagtgtggtattacaattgagagatataatgatcttaaagaaggggacatcattgaagcgtacattatggaagaagtgaagcgatgattatcgcttcactctcattcgagtgtatgatttacgatgtgcattctttaaaagagaaacgtgcaattttacaacgtgtgttaactcgtgtaaaacagcgctataatgtagctgtttctgaagttgggcaccaagatgtatggcaacgtacagaaattgcaattgtttccgtatcctcaaatcgtgttatctgtgagaaagaaatgaatcgtgtacttgagtacatcgattcatttcctgaaattgaacgtacaataacacatttggaatggtattgaatgaggtgaagagttatgaaattacgtgcgaaccgtgtgggcgagcaaatgaaaaaagaattaggcgacattatcagtcgtaaaattaaagacccacgtattggatttgttacagtaactgatgtacaagtgagtggtgatttacaaattgctaaagtatatatttctgttttaggtgatgaagaacagaaagaaaatactttaaaaggtttagcgaaggcaaaaggctttattcgttcagaaattggccaacgtattcgtcttcgtaaaacaccagaaattacctttgagtttgatgagtctatcggatatggtcatcgaattgatacacttttacatgaaattaataaagacggtaaacgtgaagaataatggatagacatttgtctatccattttttcaatgcaaaataagttttggatatttactacgagagaattatgatgaggtgaacatatatggaaggtgtagtattattacataagccaaaaggcatgacatcacatgattgtgtatttaaattaagaaagatattgcgagaaaagagaattggtcatacgggaacattagaccctgatgtaacaggagtattaccaatttgcgttggaagagcaacgaaaattgcacaatttttaacaagtgaaacgaaaacatatgaaggtgaagtaacattagggttttcaacgacaactgaagatgcttctggtgaggttgttgaaacgaaaaatgtagatcgtactattactcgtaaggaagtagagaaagtccttgcggaattaacaggcacgattgaacaaatgccaccaatgttctcggctgtaaaagtaaacgggaaaaaattatacgaatatgcaagagcagggcaagaggtggaacgtccagttcgtacaattacaattcatgaattcatattacttgatgatcgtgaagtttttgaaggagaaaatatttcattccgtttccgtgtaacgtgtagtaaaggaacatatgtaagaacgttagctgtaatgatcggggaaaaacttggtttcccatcacatatgtcgcaccttataagaacggcatctggtgaatttttattagaagattgcatatcatttgaagaaattgaagaaaacgtgcaaaatggaacagtagagtctatcttcatttcaattgatgaagcattaagtaagtttccaaaaatggttgtagatgaaaagcaagcagagaaaataaagaatggtatgttcttaaaaaatgaattagaaataacagcaccatttattacagtgtttgataaaaatgatcgttgcttagcaatttatgaacatcatccgaaacatcctggtatgttaaagccgatgaaagtacttgtgaataatcaagaactaaagctataatgaattattggaaggattattacagaaaaaggtgaattcaagcgtgaaacttattcatttaactcatccacatgaacaaaataaattagaattaccacctactgtaatggcattaggattttttgatggcattcatttaggacatcaatgtgtaattcgaactgcgaaaaaaatagcggacgaccgaggatataaaagtgcagttatgacatttcatcctcatccatctgttgttttaggaaaaaaggatgcgcatgtggagtatattacaccgatgcgcgataaagaaaaaatagtcgaaagcttaggaatcgatatattatatgtaattaaatttgatgaatcatttgcagggttattaccgcaacaatttgtagatgattatattattggtttaaatgtaaagcatgtagtagcagggtttgattattcatatggacgtttaggaaaaggaaagatggagactttaccatttcatgcaagaggggagtttacacagactgtgattgaaaaagttgaatttcaagaagagaaagtaagttctacagcattacgaaagttaattcgaaatggcgaaatggagcaaattccatctattttaggtagagcctatactgtagcgggaacagttatacacggcgacaaacgtggacgtcaaattggttttccaacagctaatgtaggtttaagtgatgagtatttattgccacctgtaggtgtttatgcagtgagattaaaagttcacggtgaatggtacgatggtgtatgtaatattggatataaaccgacttttaaagaagatgagcgtcaattatcaattgaagtgcatttatttgaatttaacaaagatatatacgatcaaaatgttacagtagagtggcatatgcgtataagagcagaaaagaaattcaacggtatcgatgagttagttgaacaaatcgcaaaagataagaaaacagcccaagaatattttgtgagcgaaaagaatatacttgctttttcaaatgaaaagtagtattctatgttatgtactttatgacaaccattgcttggcattgcgactcaccgacgcttgctaggtaattgggggtttaattaataggaggtgaaataggatggctttaacacaagagcgtaaaaatgaaatcattgcacaatttagaactcatgagactgatactggttctccagaggttcaaattgctgtcctaacggagcaaattaacactctaaacgagcacttacgtactcacaagaaagatcatcattcacgtcgtggtctattaaagatggttggtaaacgtcgtaacttactaacttaccttcgtaatagcgatatcacacgttaccgtgaattaatcacaaagcttggcttacgtcgatagtcaaagaagcgggaatattcccgcttttttgttaggtaaaaatatatcttctacgctttatagcttacttaattttaggcaatactagaggtagaatattgtgatatactatccatttacatagaagaattgaatactttaaattgagaggggtacttaaatgagtcaagaaaagcaagtcttctcgatagatttagctggtcgccagctaacagttgaaactggtcagcttgcaaaacaagcgaacggagcagtattagtaagatatggcgatacagcggttctatctacagcaactgcatcaaaagaagcaaaaaatgtagatttcttcccacttacagtaaactatgaagagcgtttatatgcagtcggaaaaattcctggcggtttcattaaacgtgaaggtcgtccaagtgaaaaagcaattttggcaagtcgtttaatcgaccgtccaatccgtccacttttcgcagatggtttccgtaacgaagtacaagttgtcagcatcgtaatgagtgttgatcaagattgttcttctgaaatggcagctatgcttggttcttcattagcgttatcgatttcagatattccatttgaaggtccaatcgcgggtgcaacagttggtcgtattaacggcgaattcgttatcaacccaacagtagaacagcaagaacaaagtgatattcaccttgttgtagctggtacgaaagatgcaattaacatggttgaagcaggagcagatcaagtgcctgaggaaacaatgttagaagcaattatgtttggtcatgacgaaattaaacgtctaattgcattccaagaagagattgtacaagctgtaggtaaagagaaatcagaagtgaaactttatgaagttgacgctgatcttaaccaagctgtacgtgaaatggctgaagaagatatgcattcagcaattcaagtacatgagaaacatgcacgtgaagatgcaattaacgaagtgaaaaagcgtgttattgagcattacgaagcgcaggaagctgacgctgatacattaggacaagtaaatgagattttatataaaattgtaaaagaagaagtacgtcgtcttattacagttgaaaaaatccgcccagatggccgtaaaggtgacgaaatccgtccattagcatcagaggttggcattttatctcgtacacacggttctggtttgttcactcgtggacaaacacaagcattaagtatttgtacattaggtgcattaggcgatgtgcaaattttagatggtcttggtgtagaagaatcaaaacgctttatgcaccattacaatttcccatcatttagtgttggtgaaactagaccaatgcgtggaccaggtcgtcgtgaaatcggtcacggtgcactaggagaacgcgcacttgagcctgtaattccatctgaaaaagatttcccatacacagtacgtcttgtatctgaagttttagaatcaaatggttctacttcacaagcaagtatttgtggtagtactttagcaatgatggatgctggtgttccacttaaagctccagttgcaggtattgcaatgggtctagttaaaactggtgagcattacacaattttatctgatattcaaggtatggaagatcatttaggtgatatggactttaaagtagcaggtacagcacaaggtgtaactgcactacaaatggacattaaaatcgatggtctatctcgtgaaattttagaagaggcattacaacaagcgaaagttggtcgtgtgcacattctaaatcatatgttatctgttattccagagccacgcactgaattatcagcgtacgctccaaagattattacaatgacaattaatccagataaaatccgtgacgttatcggaccgagcggtaaacaaatcaataaaattattgaagaaactggcgttaaaattgacatcgagcaagatggcacagtattcatttcttcaataaaccaagaaatgaacgacaaagctaagaaaattatcgaagatatcgttcgcgaagtacaagtaggtgaaatctacgaaggaaaagtgaaacgtgttgagaaattcggtgctttcgttgaattattcagcggtaaagatggattagttcacatttctgaacttgcacttgagcgtgtaggtaaagtagaagacgttgtaaaaatcggtgacgtaattacggttaaagttatcgagattgacaagcaaggtcgtgttaatctatctagaaaagtattgctaaaagaagagcaagaaaaagaagctgctaaagaagaaaacaaacaagagcagcaataagcgaaagccagtttaactggctttttttgttatgtaaaaatatgatttatatatatttttatgtcagtataggtatagttttcattataacgctcaaattaacaaagataagaagaaaaatgtttttttatatagttaatttgggagggtttatatgaaagttcgtatattggcatacatatgtatattttctttatatgtcagtttaggctcttattctgtttttgcacaggataacttatatgaagaaattcaaaagcatgcaaaacaatatgagattgcacctcaaaatgcgatgattgataagatatggaaagcaacaccaggatataatggaagacaagttgatatggaagcatcctataacaatatgaagaagctaaaggaatttgatcaaaaacaccttgaatttaaggaagtatcaccgagtgtccacttagaagatttatcacctgctccaatttatagggggcatccgaataaaaagatggtgggattaacaataaatgtggcatggggaaacgagtatttgcctcgtatattagaaatattgaaaaagcatgatgtgaaggcgactttctttttagaaggacgttgggtgaaagaaaatttacgatttgcaaaaatgattgtcgatgcaaatcaagaagtcggaaatcattcttatacgcaccctaatatgaaaacgctatcgtctgatgaaatacgagagcagttacaaaaaacaaatcgaatgattgaagctgctacgaatcaaaaggtgagatggtttgccccgccgagtggaagttttcgggatgaagtcgtgaaaatcgctgatgatttccaaatgggaacgattatgtggactgtcgatacaatcgattggaagcgacctgagccagatgtactattgcagagagtaatgagaaaaatacacccaggtgctatcgtattaatgcatcctacttcgtcaacggcagaagcattagatacaatgattaaaaaattgaaggaacaaggatataaagtagggaatataacagaattactggatgaaaaacgtgtggattaaatacatttgcatgacattcatccttaaacttgttatcattaaataatagcacttatttagagaaactggcagtaggaggaaagtttttgattaaaaaatatacttgtaaaaatggtgtaagaatagttatggagaatataccaactgtaagatcggttgcgattggtatttggatccatgcgggatcaagaaatgaaaatgaaaaaaataacgggatttctcactttttagagcatatgttctttaaagggacagaaacacgtagtgcacgcgaaattgcagaatcatttgatagtattggtgggcaagtgaatgcttttacttcaaaagagtacacttgttactatgcaaaagtgctagatgaacatgctaaatatgctttagatgtattagctgacatgttctttaattcaacatttgatgaagaagaattgaaaaaagagaagaatgtcgtatgtgaagaaattaaaatgtacgaagatgctccagacgatattgtgcatgatatgttaacgaaagcaacatatgaaacgcatccgcttggatatcctattttaggaacagaagaaacacttgatacgtttacaggtgatacgctacgccaatatattaaggatcattatacacctgaaaatgtagttgtttcagttgcaggaaatattgatgaagccttcttacaaacggtagagcaatatttcggtagttatgaaggaacaacaaatcgcgaacaagtacatagtccaattttccattttaacaaagtagcacgtaaaaaggaaacagaacaagctcatttatgtttaggatataaaggcttacaaatgggacacgaagatatttataacttaattgtattaaataacgttttaggcggtagtatgagtagccgtttattccaagaagtacgtgagcaacgtgggttagcttactcagtattttcttaccattcttcttatgaagatacaggtatgttaacactgtatggtggaacaggtagtcaacaattagatacactgtatgaaacaatgcaagaaacattagaaacattgaaaaatacaggtattacagaaaaagagcttattaatagtaaagagcaattaaaaggaaacttaatgttaagtttagaaagtacgaatagtcgtatgagccgtaatggtaaaaatgaattgctacttcgtaagcatcgttcacttgatgagattatcgaaagtgtaaacactgtaacaaaagaaaatgtagatgggttaattcgtaacatgtttacagatgaattctctgcagcattaattagtccagatggaaaacttccaaaaggaataaaactataatcaacttttacgatgtatctgaaaataaccttctctctttttaaatgagagaaggttattttttttatacatatagaataggtactaattatagacaatgcaaatgaaaaatttagtaggggagtggagtgagtatgcgattaagtgaattaagcggtaaagaggttgtagatatagaaaaagcggaaaaaatgggagccttaggttatatggatttagagattaatgagaaagacggacaaatacaaacacttataatacctgtagggaagtggggaggttttaaaaaggaaccacaagaagtaagagtggcatggagtcaaataaagaaagtcggacacgatatgcttctttgtgatagtatagatcgttcaaattcggagtgaaggatggccattttggtcatctttttttgtatctacatagaaacctgataaatcatatgtgcatttggattttcaatcaccataaactcgtacattacatatgatgtggaggaaaaagaaaaagtaggcacttttcttataaatgacagaaaaagaaggtgaattagggaatgttgactgagatgcatattgctgtcataggaggagatgcaaggcagctagaagtaattcgtaagctagttgaattggatgcgaaactttctttgataggttttgatcagttagatcatggtttcacaggggcagcaaaagaaagtatacaaaatttagatttcacttctgtagacgcaattattttgccggttgccggtacaaatgccaaaggagaagtagatactattttttcaaatgaaaaagtttcaataacgaaagaacaaattgaaaatacaccagaacactttactatatattcaggtattggtacaccttacttggaaaatctcgtatctactacgaatcgaaaacttgttaaattatttgatcgtgatgatgtagcaatatacaattctattccaacggtagaaggtacattaatgatggtaattcaacataccgactatacaattcatgggtccaatgtaatggttctaggatttgggagaacaggaatgagtgttgcgagagcatttcaatcattaggagcccatgtcaaagttggagcaagacgatctgaacatattgcacgtattacagaaatgatgttttctccttttcatatgcaagacatagagaaagaagtaggaaatatcgatattgtaattaatacgattccgcatctcgttgtaacagcgaatgttattgcaaaaatgccagctcatacgttagtgattgatttagcttctaaaccaggcggtactgactttagatatgcggaaaaaagaggagtcaaagcattgctagcacctggattaccaggtattgttgccccaaaaacggctgggcaaattttagcaaatgttctttctcagttattagcagcagatgcaattgcaaaggaggaggaaaagaaatgagtttgaaggggaaacgaattggtttcggatttacaggttcacattgtacgtacgaagaagtaatgcctcatttagaaaaattaattgctgagggagcagaagtacgtcctgttgtttcttacactgttcaatcaacaaatactagatttggagaaggagcagagtggattaagaagattgaagaaataacaggttttaaagcaattaattcaatcgttggtgcagaaccactaggacctaaaattccactagattgtatggtaattgcaccactaacagggaattctatgagtaaatttgcaaatgcaatgacagactctccagtattaatggcagcgaaagcgacgttaagaaatggcaagcctgtcgtattggctgtttcgacgaatgatgctctagggcttaatggagtaaatctcatgcgcctaatggcaacaaaaaacatctacttcgtcccattcggccaagatgcaccagagaaaaaaccgaactcaatggtagctcgcatggagctgctggaagatacagtgttagaagcgctgcaagggaagcaattgcaaccggtggtcgtagaaaaattcagatatatgaattaaaaaacgaaaaaaaacggacaatttttgatgaaaccatcattcttactgtagaatatgataaaattaacgttattaagattagaaggggtattgtatactccttctgattctaagttatagaaggattggtatctagaaaggggcatagtgatggaaaagcaaaaaacttttcatgtcgctgtagttggagcaaccggcgcagttggtgaacaaatgttaaatactttagagaaacgagaatttccaatcgggaaattaacgttactttcatctaaacgatctgcaggtaagaaacttgtatttaaaggcgaagaatttacagttcaagaggcaactcctgaaagctttgaaggagtagatatcgcactatttagtgctggtggatctgtatcgaaacaattagcgccagaagcagcaaaacgcggtgcgattgttgttgataatacaagtgcattccgtatgacagaaaacgtgccacttgttgtacctgaagtaaatgaaaacgacttaaaagaacataatggtattattgcaaatccaaactgttctacaattcaaatggtagtagctcttgagccagttcgtcagcaatatggtttaaaacgagtaatcgtttccacatatcaagctgtatcaggtgctggtgcggcagctattgaagcactgcatgaacaatcacaagcaatcttaaatggcgaagaagttaaggcaaatgttcttcctgtatcaggtgataagaagcatttcccaattgcttttaatgcgattccacagattgataaattccaagataatggatttacgtttgaagaaatgaaaatgattaacgaaacgaaaaaaattatgcatatgcctgaattagaagtagcggcaacatgtgtacgtttaccagttgtatcaggacactctgagtctgtttacatcgaagtagaaaaagaaggcgtaacagtagcagaattaaagagcttacttgcaaatgcggaaggtattgttctgcaagataatccagaagagcagttatatccaatgccagctactgcagtaggtaaaaacgaagtattcgttggaagaatccgtaaagatttaaataacgataaaggattccatctttgggtcgtatctgataacttattaaaaggcgctgcatggaattctgttcaaattgcagagcgcttagtaaaattacaattagtgtaaacggctaagagaaggtgcaaaatatgaaaataattgttcaaaaatttggtggcacatcagtacgtgatgacaatggacgtaagcatgcgcttcatcatataaaaaaatcattagctgctggttataaagtagttactgtcgtatctgctatgggccgtaaaggtgaaccatatgcaacggatacgttattaagtcttgtaaatcaagaggaatctactatttctaaacgtgagcaagatttattattatcatgcggagagttaatctctgcaattgttttctctaatatgttgaatgagaacggtataaaagcagcagcattaaatggtgcacaagctggttttgtaacgaatgatgactttacgaatgcaaagattattgaaatgaattgcgatcgtatacatgaagagttagaaaatgtagatgtaatcgtcgttacaggatttcaagggcaaacgaaaaaaggtgatacgacaacacttggacgcggaggtagtgatacttcagcttcagcattaggtgttgcacttcatgctgaatatatcgatatattcactgatgtagaaggtgttatgactgcggatcctcgtattgtaaaagatgcacgtcatcttcaaactgtaacgtataacgaaatttgtaacatggcttatcaaggtgcgaaagtcgttcatccacgtgcagttgaaattgcgatgcatgcaaaagtgccacttcgtgtacgttctacgtattctgaaagtgaaggtactcttattgcagcatacgatggtgctacaaaagggcaggatgtagaagaacgtcctgttacaggtattgcccacgtatcgaacgtaacgcaaattaaagtacttgcaaaagaaacggcatacgacatacagcagcatgtatttaaagaaatggcaaacgaaggcattagtgttgatttaattaacatttctcctactggtgtagcttacacagtaaatgataatgtatcagctcgtgctgtcgaagtgctaaaacaacttggatatgagccaattgtgacagaacattgtgcgaaagtatctatcgttggagctggaatggcaggcatcccaggggttactgcaaaaatcgttacagctttagcggaaaaaggcattcaaatcctgcaatcggcagatagtcatacaacaatttgggttcttgtaaaagaaattgatttagtggaggctgtaaatgcattacatagtgcgtttgagctttcaaaagaaaagcaactggaacaataaggagtgagaccatgatagattttgggacaattgcaaccgcgatggtaacaccgtttgatataaacgggaatatcgattttgcaaagacaacgaaattggtaaattatttaattgataacggtacaacagcaatcgtggtaggaggaacgacaggagaatctcctacattaacttcagaagagaaagtagcgttatatcgccatgtcgtatctgttgtcgataaaagagtgcccgtaatcgctggaacaggtagcaataatacgcatgcttctattgacttaactaaaaaggcaacagaagttggagtggatgcagtaatgctagtagcaccgtattataacaaaccgagtcaagaaggaatgtatcagcattttaaagcaattgctgaaagcacgccgcttccggttatgctatataacgttccaggacgatctattgtacaaatctccgttgatacagttgttcgtttatcagaaatagaaaacattgttgctattaaagatgccggcggcgatgtgttaacaatgacagaaatcattgaaaaaacagcggacgactttgcggtatacagcggtgatgacggtttaacgttaccagctatggcagttggagcgaaaggtatcgtttcggtagcctctcatgttatcggaaacgaaatgcaagaaatgattacagcatttcaatcaggagaatttaagaaggcacaaaaattacatcaattacttgtaagagtaactgattcattatttatggcgccaagtccaactccagtaaaaacagcgttacaaatggttggattagatgtaggttctgtacgtttaccacttcttccattaacagaagaagaaagagtaacgttacaatctgtaatgcaatctatccctcgttaataaaaaatgacctagtgtagaactaggtcattttttattatatgcaaatctttttctcgttttctcacctatatgtgttcttataagaatattaatcgcttcttcattatgtgtataagaaaataatcgtactcctttaaccgagtcaaaaaatgatagatattatggaataaacgtaataaactacggtgtttgtttttagagaaatcccctcaaatttgacgtaattcataaaaaaactccattttgtaagtgtttttgttggattctagaaaaataaatcttgaaactccctattatgaaatgaatttagcatatgtatggctagttcttcaaaataatatggagtataaaatcgaagtaaatataaaggaaataccttcgatacttttgttgtcattccgttcttttactctttctttcgcacgatttaacttgtgttctatttcttgtatcaggtataatatggctaagtagcttagtacgggtatgcttagcaaaattgggaaaaattataatttaattaaattttcatatcatatcgaataagatatttgatttatataatgaaagagaggtgaaacctggtttaaaaaataaacaaggacatgatatcgcataacggtaaggacattcgtcttggacggtgaaaatatggtggttgtagagtttcccctggtgtctctgcaattttagtgaaatcagtgtttgcaagatttttaaaccaggcaacaacatgaagagaaaagagaatgagtctgttaaagtatttgctcttggtggagtaggtgaaatcgggaaaaacatgtactgtgttgaaattgattctgaaatctttatcgtagatgcagggttaatgttcccgggagatgaaatgtttggaattgatatcgttattcctgatattacatatttagtggaaaatcaagagcgagtaaaaggtttatttattactcacggtcatgaagatcatattggtggaattgtgtatgtacttcgtaaattatctattccagtctatgcaacgaaattaacagtaggacttatacaagaaaaacttggtgaagcgggcatgttaggccgtgtagacctaaaaacaatcgattcaaattcaacagtagaatttaacactacaacggtgtcattcttcggaacgacacatagtattccggattctgttggcgtttgtttccatacatcaaaaggtgcagtcgtatatacgggagactttaaattcgatcaaactccaattggaaatagtggagcagaccttgggaaaatggcgcaaatcggaaatgaaggcgtactttgcttattatctgatagtacaaacgcagagcgcccaggttatacaggttcagaaaaagaagttggtgtagaaatctctaaagtgttctatggcgcagaaggtcgtattatcgttgcttcatttgcatcaaatgtacatcgtattcaacaagtatttgatgcagctgctgaaacagggcgaaaagtagcggtagtaggacgtagtatggtgaaagtagtagacattgcaagacgtcttggttatttagatgttccagaaggtatggttatttcattacaagaagtagacaacttcccagagaaaaaggtagctattttaacgacaggtagtcaaggtgaaccgatggctgctctatctagaatggcaaaacaagcacataaacaaatttcaattcgtaaaggtgatactgttatcattgctgcttcgccaattccgggtaatgaaatatctgtatcaaaaattattgatttgttatttagagctggagctgaagttgtttattacggcgaaagaaaagttcacgtgtcaggtcacggtagccaagaagaattaaaattaatgttaaatttaatgaaaccaaagtactttgtacccgtacatggtgagttccgtatgcaaaaagcgcatgcatatttagctgaagatgtaggtattacaagagaaaatatctttatcgtagaaaaaggcgatgtaattgcttttggtgacgatgaagcgaacttagtcggtaaagtacaagctggtaatgttttaattgatggattaggtgtaggtgacgttggtaatatcgttcttcgagatagaaagatgttatctcaagatggaatactagtagttgttgtaacgcttggtaaagatgaaaagaaaattatctctggtccagaaatcatttcacgtggtttcgtatatgttcgtgaatcagaagcgttaattgaacgttctacagagattgtacgtatgattgttgagcagtcaattaaagaatattcaattgaatggtcaatgttaaaacaaaatattcgtgaattattagggcagttcttgtacgaagagacaaagagaaaacctatgattttaccgattattatggaagtataaaaaagatcacccttatgggtgatcttttttctttttaaccctatcgaatgaaatttataacttaagaaataatagttatatacgagtgaaaggggatgcgaaatgacagaacgtgatcgatatacaaatgaagaaaaagaagctgagccaaaagaagctggaaaagaggcttcgatagtcgaaaaaattcaacagcttggacagacaaatgtaccacagatgaatgaatcacgtattcattgtttaacgattatcggacaagtggaaggtcatgttcaattaccaccgcaaaataaaacaacaaaatacgagcatatcattccgcaaattgttgcgattgaacaaaatccgaaaattgaaggtttgcttttaatattaaatacggttggaggtgacgttgaagctgggctagcaatttctgaaatggtagcttcactttcaaaaccaacagtatctctagttttaggtgggggacattccatcggtgtaccgattgctgtttctactgactattcgtttattgcggaaactgcgacgatgacaattcatccaattcgtttaacaggtcttgtcataggtgtgccacaaacatttgagtatttggataagatgcaagaaagagtcattcgttttgtgacgaagcactcgaaagtaacagaagatcgttttaaagagcttatgtttgcgaaaggaaatttaacgcgagatattgggacgaatgtaattggtggggatgcagtaaagtacggtcttatagatgatgtcggcggtattggaaatgcaattcgaaaattaaacgaattaatagatgttcgtgcggaagatagtacagaagggacaatgctacaatgattttatatacaattatgccagagcaacttgtgtatccggccgattattcacaatgtgaaagtcaaaaagttgtaaatataaatggtgtggaattaatggtttctgaagaggaacatggatgttattctattgtacgtgtgctaagtacggacccacttcactatttagagtttgagcccggtcagaaaataaccttttagcaaaaagaaggattttgtttagaagctatggtataatataaaaaacaagacggttgagcagccatgagtaggctgctttcttctgtttatttagcattttacaagaagtgtaaaaatagaagatataaagacctgaaaaatagagaaaacagacatataaatagagcattttgaggggagctttatttatatgtagaacgcgaggtgaagaaatggcaaaacaaaagcaaagagggacgaaggcaaaggcaaggcgtacgataaagccaactttgtattatgaaattgtcggtttaactctttttgcactttcaatcattacgattttacagctaggcgttgtaggaaaatcgtttgtgttattttttcgcttcttctttggtgagtggtacataattggtgtgttaggtgtaatagctttatcggtttcctttgttataaaacgcggatggccgaaccttttaaataaacgattaattggattttatttaattgtattggcgatattaatgtttagtcatattacattatttaaccttcttacaaaagatggagcagtgcaaaatacttctgttattgtgagtacgaaagataacttctttcttgaaatgaaaaaggggccagatagcgttcatttaggtggtggtatgtttggtgcgcttatgttcgcaacatgttacttcttatttgacgaagtaggagcttatatcattggtattattctagttattctcggtatactttgtataacaaataagcatattggagaagtgttagcgccagttggtagaattcttagaagtcaatttcaagtgatgcaaggggattataaagattggagagctaaaagaacggctgaacaaacagaaaagaaaaaaacaacaagaagcacaagaagcaaacgtgctgcagaacaagaagaaattattgagccgatggaagaaatctcaattgatcctccgattatttcgaatttcactgagaattatcctgtaaatgaagaagaggataaacgaattgaagtagagcaagaagatttgattacttcaccgtttattgaagagactccgccaattgaagagccaaagaaaaagcgtggagaaaaaattgttgaatcgttagagagtgaagcgcaagcacctcctatgcaattttccaatgtagaaaataaagattacaagcttccttcacttgatatattaaaatttccaaagaataagcaagttacaaatgaaaatgcggaaatttatgagaatgctcgtaaattagaacgtacattccaaagtttcggagtgaaagcgaaagtaacaaaagtacatagaggtcctgcagttacaaaatatgaagtgtatcctgatatgggggtaaaggtaagcaaaattgtcagtttaagtgatgatttagcccttgctttagctgccaaggacattcgtattgaagcgccaattcccgggaaatcagctgtagggatcgaagttccgaactcagaagtttcgatggtaacgctgagggaagttcttgattctaaggctaataatcatccggaagagaagttgttaattggtcttggtcgagatattacaggtgaagctgtactagcccgtttaaataaaatgccccatttactcgtagctggtgcgacaggtagcgggaaaagtgtatgtattaacggtattattgttagtattttaatgcgtgcaaaaccacatgaagtaaaattaatgatgattgacccgaaaatggtagagttaaatgtatataatggtgtgcctcatttgttaacgccagttgtaactgatccgaagaaagcatcgcaagcattgaaaaaagttgtgagtgaaatggaacgtcgttatgaattgtttgctcatagtggtacacgtaacattgaaggatacaacgattatataaaagagcataatagtcaatcagaagcgaaacaacccgaattaccttatattgtagtaattgtggacgagttagcagatttaatgatggttgcttcgtctgatgtagaagatgcgattatgcgtctagcacaaatggctcgtgctgctggtattcatttaattattgcaacgcaacgtccgtcagttgacgttattacgggtgttattaaagcaaatattccatcacgtattgcattcgctgtatcttctcaaacagattctcgtacaattcttgacggtggtggtgcagagaagctattaggtcgtggagacatgctgtttataccaattggtgcatcgaaacctgtacgtgtacaaggtgcatttttatcagatgatgaagttgagagagttgtagaatatgttattggacagcaaaaagcacaatatcaagaagatatgattccgcaagatgttcctgatacgaagcaggaagtagaagatgaattatatgatgaagcggttcaacttgtagtggaaatgcaaacagcatctgtttctatgttacaacgtaggtttagagtaggttatacgcgagctgctcgcctaattgatgcaatggaaatgaatggtgtagtaggtccgtatgaaggtagtaaaccgagagaagtgctcattaatgatgtacaagaaaaaagttcttaaaaaaagcctaattgtttttacaattaggcttttttatatagtgtttttgttatatactatactcagcaataaagaaagggcttacatttaggggtgctctttagaatacgaatactttgattatgttttatgtaaatgttcgatatttaatgcagaaaaatgttggattttgttgacacgtatgagagcaagtggtaagattacttcgaaaagaatcactgcctcatataatcttggagataaggtccataagtttctacctggcaaccatgaattgctagactatgaggggaaaagtgtgtaacaaaggatgtaaaggatctttgtgccgaactttttctcgaaatgaggaatgtttatggtgcaaagttttttttatgcaataaagagtgaaaatttcattaaaaaaaattattattatttattcgacaattacgcttattttggtgtttagtcatttgtactatgttgtaagttgaaaaaagagaaaagaagtcttacatcagaggtcgaataattgaaatgcgggggagtcttatgtcagtaaaatccgatagtcgtcacctatatctacgggtgattgatcacatcaaagaaaaaattaaagatggggcttataaagaacgacaaaagttaccatcagagtttgatttagcgaaagaacttggcgtaagtagagcgactttaagggaagcgttgcgtattttagaagaagaaaatgttgtcattcgtagacatggtgtagggacatttgtaaatgcaaagccattattttcttctggaatagaacaactttctagtattacagatatgatttctagtgtggggaaaacaccaggaacaatctttttatcatcatctactacaactttaacagaagaggaaaaagagaagtttaatagtgaagatggttttaatgcagtgatgattgaacgcgtgcgtacagcagatggggaacctgttgtgtattgtatcgataaacttgcaaaagaaatattgccagatttatcgggttacaatgaggaatcattattaacggtgatacataataacacacataagcgcataacatatgcggttgcccacattgagccaattggctatcaccctaaaatctcaccgattttagaatgtgagcctgaaacagcactgcttgtattaaaacaaatgcactatgatcaaaatgatgagccaatcttatattctatcaattactttagagctgataaatttagcttccacgtattaagaaagcgtatgtaggtaaattcctttttagggaggtgacagcaagaagtaaggaacagcagcgtaagaataaataaatatatatcatttttggaggggtttctagtatgaagaaaaaagcaggccttttattatcattaacattagcagcaagtacagttttaggtgcatgtggtaactcggataaggcgagcagtgacaagaaagacacgaaagacaataaagacttcaaggttggtcttgtaacggatgttgggggcgttgatgataagtcattcaaccaatcttcttgggaagggttacaaaagtttggtaaagataatggtttaaaagaaaagacaaattatcgttaccttcagtctgaaaaagaggctgattatattccgaatttaaaaaaattctcgaaagataaatatgatttaacattcggaattggttataaattagagggtgcaattaaagaagtagcaaaagaatcgtcaaaacaacaatttgcaatcgtagatactgttgtagatgcaccgaacgtaacgagcattacgtttaaagatcatgaaggatcattccttgtaggtgcggtagcagctatgtcaacaaaatcgaataaagtaggatttgttggtggaatgaaaagtgatttaattagtaaatttgaaaatggatttaaagctggtgcaaaggcagtaaatccaaacattgaaatcgtatctgaatatgcagaagcattcgataagcctgaaaaaggtacagttcttgcttcagcaatgtatggtcaaggcgtagacgtaatttatcatgctgctggtggtacaggtaacggtgtgttcacagaagcgaaaaaccgtaagaaaaaaggtgaaaatgtttgggtaatcggtgttgaccgtgaccaacatcaagaaggtatgcctgaaaatgtaacattaacttcaatgattaaacgtgttgatgtagcagtagaaaaagtagctaaagaagcaaaagatgggaatttaaaaggtgggaaaattgaagagtttggcttaaaagatgacggtattggtatttcaaaaacaactgataacgtgaaaaaagttaaccctgaaattttaacaaaagtagaagagcttgaaaagaaaattacagccggtgaaattaaagtgccagctacagataaagagtataaagaatacgaagcttctctaaaaaaataaatagagaaatagcaaaggttagttcatagaactaacctttgtatgtataaaacttccgaattgcttaataagttaatagtgtaatagggaatgttccctgttaaaaggaggaacacaatggaatacgtaattgagatgaataacattacgaaagtattcccaggcattgtagcgaatgatgatattacgctgcaagtaaagcagggtgagatacatgctttacttggagaaaatggtgcagggaaatccacattgatgaatgtactatttggtttgtaccaaccagagcagggtgaaattaaaattaaaggtaaacctgtaaaaattacaaatccgaatatagcaaatgaccttggtattggaatggtccatcaacactttatgcttgttcataattttacagttacagagaatattattctcggaaatgaaccgaagaaaaaagggaaaattgctgttgaggatgctgctaaagaaattcaaaaactgtctgaacaatacggtttggctgtagatccatatgcgaaaatacaggatatttcagttggtatgcaacagcgtgtggagattttgaaaactctttaccgcggtgcagaaattttaatatttgatgaaccgacagctgtgttaacaccacaagaaattcatgagctaattcaaattatgaaaaagcttgtacaagaaggaaaatctattgttcttattacacataagttgaaagaaattatggaagtttgcgatcgttgtacgattattcgtaaaggaaaagggattggaacggttgacgttgcaaatacggatgaaaataaacttgcagaattaatggtcggacgtcaagtgaattttaaaacagaaaaaatagacgcgaagccaaaagaagatgtactttcaattgcaaaccttgttgttcacgatgcacgtcaactacctgctgtaaaaggccttgacttaactgttcgtgcgggggaaattgttgggattgcagggattgatggaaacggacaaagtgaattaatagaagcgattactggtttacgaaaagttgagtcaggttctattgcaattaaaggaaaagaaataacaaattggcctgttagaagaataacagaagaaggaattggtcatattccagaagatcgtcataaacacggactcgttcttgatttttctgttagagataatatagttcttcaaacgtactataaaaatccgttttcaaagaaagggattttaaattttagcaaaattacagaaaaagcaaaggctcttattgaacagtttgatgtacgtacacctagtgagcaaacgttagcacgcgctctatctggggggaatcaacaaaaagcaattattgcacgtgaagtagaccgaaatccagatttattaattgcggcacagccaacacgtggtttagatgtaggagcaattgaatttattcataagagattaatagagcaaagggataaaggaaaaggtgtattacttttatcattagagttagatgaaatcttaaatgttagcgatcgaattgctgttatttatgaaggggaaattgtagcaatagttgatgcgaaagaaacgaatgaacaacagcttggattgttaatggctggaggaacaaagaaggagcaggtgggtacaaatggctaaaaaacttttaacagaacgaacgataaatattttagtcccagtactatccgttattttcggcttacttgtaggagcgattgtaatgctagttagtggctatgatccaattgttggttatagtgcactttggacaggaatgttcggcagcgcaagtgcgattggtgaaacgctccgtacaatgataccgcttattcttgctggcttatcggtcgcgtttgcatttcgtacaggtttatttaatatcggggtagagggtcaattgttagttggttggcttgcagcggtttggttcggttatgcagtctcactaccagcgttccttcatattccattatcgattttatttgccgcattggtgggcggaatttggggcttcattccgggatatttaaaagggaagtttcaagtgaatgaagttattgtaactattatgatgaactatattgcgttgtatgtaacgtatgacatcattaagcgtttcttacatgcgggtaatgacaaaacgtatgatattaaagagagtgcgtcactatcttcagactggcttgcttctattactgacggttcacgtctacactggggaattattgtagcaattttaatcgctattttaatgtggttcttattagatcgaacaactttaggttacgaattaaagtctgtaggatttaatcagcatgcttctcaatatgcaggtatgaaagtttctcgtaatgtagtattctctatgacaattgctggtgcatttgcggggattggtggagcgatggaaggattagggacattccagagtatgacagcgatgtcttcgtttacaggagtaggatttgatgggattgccgtagcattacttggagggaataatccgtttggtataatcctttcagctttattatttggtggtttgaaaagtgcttcccctcaaatgaactttgaggcagatgtaccgtcagagcttattaatgtaattattgcatgtatcatcttctttgttgcatgtagttatgtgttaagatgggcgcttacacgcatgagcaaggaggggaaataaatgagctttttagatatattagccattcttgtgacgggtacgttatatacatcggcacctatcattttcacagcactaggtggtgtatttagtgaacgatcgggtgttgtaaatatcggattagaaggactaatgctatttggtgcatttattggagttgttacaaacttattaatgggtgatacttggggaacgatgactccatggattgcgttattatttgcggcaattggtagtgggttatttgcattacttcatgcggtagcttctattacattccgagcagatcaagttgtaagtggtgtagccattaacttcttatctcttggtttaacagtatttgcaattaagaagatttttgataaagggcagactgactttattcagtatcgtattgaaaagattgatattccaggcctttcggatattccggttttagggaaaatatttttctcgaacgtaccaataacgtcgtatattgccattattttagcattcgttgtttggtatgttatttataaaacaccgttcggtcttcgtctacgtgctgttggtgaacacccaatggcagcggatacgatggggattaatgtatataaaatgcgttatattggagtctgtatttcaggagtgtttgctggaatcggtggagcgatttttgcaatgtcaatttctaataacttctcaggggcaactattacaggacaaggtttcttagctttagctgctatgatttttgggaagtggaatccactaggcgcattaggtgcagctctattctttggttttgcgcaatctctaagtgtaacgggcggaacaattcctgtattagatcaaattccaagtgttttattaacgatattaccatatgtattcacaatattagcgcttgttggttttgtaggtcgttctgaagctccgaaagcattaggaactccttatgaaaaaggaaaacgataagtattttataagtataaaaaagctcgcacattagtgtgggcttttttacatagaatatatttaatacggaattttactatgttccttacatattaaagtttttagaaagaatcatatgtaagcataataagggagaaaagttgattttttatttctaaaaactgtatattgaagaggaatattcctatatacgtaaaggagggctataaatgaaactaatggaacaacaactacatgagttagatggtttgcgcgtacatattattccgactgataaatataaaacgaatacctttgtatttcgttttaaagcgcctttaaatgaggagacggtgacagagcgtgccttattgccatacgtattgcaaagtgcgacagaaaaattaccttctgtaattcgtcttcgtcaatatttagaagaattatacggatcttctttagcggtagatgtaagtaaaaaaggggaagaccatattatctccatttatgtagacattgcaaatgaagtttacttacatgatgcaccaccgttatttgaaaaagcgctttctatgttgtcagatattgtgttacatccagcaacggagggcaacggtttcctatcttctatcgtagaaagtgaaaaaagagcactgttacagagaattgaagccacttatgacgataaaatgcgttatgcaaacgagcgtttaattgaagaaatgtgcaaagtagaaccgtatcgtttaagtgcaaatggaaaaaaagagagtgttatgtctattacaaatgaaagtctgtatcaatattatcaaaaggtgttagcggaagatgaaatggatctatatattattggtgatatttcagaaaacgccgttgatcttgtaagtaagtatttttctatttcagctcgtccagtgagagaaagaaatgtactccttcatagacgaaataatgaagaaaaagaagttgttgaaaaacaagaattaaaacaaagtaaattacacatcggttatcgtacatttgtcacatataaagatgaagattattttgcattgcaattgttcaatggattgtttggtggcttttctcattcgaagttattcgtaaatgtgcgtgaaaaaaatagtttagcgtactatgcagcatcgcgctttgaaagtcataaaggtttattatttgttatgtcaggaattgaagcgaaaaattatgaaaaagcagttgagattattaaagaacaaatgcttgcgatgcaaaacggagagttttctgaagaagaaatacatcaaacaaaaagtgtcatccaaaatcaaatattagaggcaattgatacaccacgtggctttgtagaaatgctatatcatggtattatttcagatcgtacacgtccagttgaagaatggcttacaggtatagaaagtgtgacaaaagaagaaattgtaaaagttgctaaaaatattgaactagatacaatttactttttacaaggaacggagggagagtaagtggagaaaattgtttatgagcaattaaaagaaacactctattatgaaaaacttcctaatggattagatgtatatgttttaccgaaacaaggatttaataaaacatttgcaacgtttacgacgaaatatggttctgtagataatacatttgtaccattagggaaagaagaaatgattcgtgtgccagatgggattgcacattttcttgagcataaattatttgaaaaagaagatcatgatgctttccaattgtttagtaaacaaggagcatcggcaaatgcttttacatccttcacacgaacagcttaccttttttcaggtacttcaaacgtagaacaaaatttaaatacattgctaaacttcgtacaagagccctatttctctgaaaaaacggttgaaaaagagaaggggattattgggcaagaaattcaaatgtatcaagataacccagattggcgtttgtactttgggttaattgatagcttatttgtaaaacacccaattaaaattgatattgcggggacaatcgaatctattagtaaaattacgaaagatttattatatgaatgttatgaaacattttatcatccgagcaatatgttattatttgttgtgggtgcaattgatccagagaaaacaatggatttagtacgtgaaaatcaagcgaaaaaagattataaaaaccagccagaaattgtgcgttcatttgaagaagaaccaaatgaggtaaatgaaaagaaaaaaattatttcaatgcctgtgcaaacaccgaaatgtttagttggtattaaagcgactaatttaaaagaaaaggggcaagcgcttttaaaacaagaaattgcgcttacgttacttttagattatttatttggaaaaagttctgttcattacgaagctttatataatgaaggacttattgatgattcattctcgtatgactatacagaagaaaataacttcggttttgcaatggttggtggtgatacgaaacaacctgatgcattggcagatcgtttaaaagatattttattaaaaacagattatgatcaattagatgcggcggcattagaacgagtgaagaaaaagaaaattggtggttttttacgctcgttaaattcaccagaatatattgcaaatcaatttacacgatacgcgtttaatgaatctagcctatttgatgcattgactgtattagaaggactaaccgttcaagacttacaagaagtagcgggattattgttatcagaagaaaaaatgagtgtttgtcaggtgttaccgaaaaaataaaattttaaagataccctcatcttatcattgaaaaattgtaagatgagggtattatttagttgtgtgaaaattgaacttgtagagataagagagggaatttatgaaaaagtatgcgttagtaactggagggagcggagggattggctctgctatttcgaaacaattaattcaagatggatatacagtttatgttcattacaataacagtgaagaaaaggtattggaattgcagaaggcatggggagaagttatccctgttcaagctaatttagcttctagtgatggagcagaacgattgtggggacaaattgaacatcctattgatgttattgtatacgcagctgggaagagtatttttggactagtaacagatgtaacaaacgatgaattggattatatggtagaacttcaagtgaagaacgtatataaattactttctatggcacttccgcctatgatcgggagaagaagtggtaatattgtaattgtttcatctatatggggacaaataggggcttcttgtgaagtactttattcaatggtaaaaggggcgcaaaattcatatgtgaaagctttagcgaaagaagtttctttaagtggattacgtgtgaatgcagtagcaccaggagcaattgaaacggaaatgttaagtgttttttctgaagaagataaaatgggaattgctgaagatataccattaggtagaataggattaccagaagaagtagcgaaaacagtttcatttctcgtatcaccaggagcgtcttacataactggacaaattatcggagtgaatggcggttggcactgctaaaaaattcttacataaaaaatgaatagttgcacaaattaaggatgattttattactcaatagtgaggtgcttaattatgtcagtattagataattttgatcagtggaagagctttttaggagaacgtttagagcaagcgcaagacaaaggtttagatggcggtgcggtatcagatatggcatttcgagttggcgactatcttgctaatgaagtagaaggacgcaatgaccaagagaaattattagctgagctttggaaagttgctgatgaacaggagcaacatacaattgcaaatttaatggttaagttcgtacaacataagtaaaagtagagaggagattctcctctctactttttttgtataataattacacaggatagattatacatttagcttccctattagggtgaaatcatataatatagtacgtaggtgtaaagtaagcaaggggagtgatcttggatgattgaatggtattttgaatatgaaatacataaaaaccgacctggcttgcttggtgacgtttcttcgttaatcggtatgctcggcattaatattgtcacaattaatggtgtagataatgcacgacgtgggttacttcttatgtgtgataatcaagagcaaatctctagacttgaatcaattttaaatacgatggataacataacggtaacgaaatatcgtccgcccaagctaagagataagctagcggttaggcatggtaggtacatacaacgagatgcagatgataagaaaacatttcgatttgtgcgtgatgaattaggcttacttgtagactttatggcagaaatcatgaaaaaagaaggccataaactaattgggatacgcggaatgcctcgtgtcggaaaaacagaatccattgttgctgcaagtgtttgtgcaaataaaaggtggttatttgtatcatctactcttattaagcaaactgttcgcagtcaattaattgaagatgagtatagcgatgacaatattttcatcctagatggaattgtgtcaacgaagcgtgctaacgaaagacattggcagctcgttcgtgaaattatgagattgcctgcaacgaaagttgtggaacatcctgatgtatttgtgagtcagtcagaatacacattggatgattttgattatattatcgagttgcgtaacgattatgatgaagaaatacaatataatttagtagatgaaattgagcaaggtacgcaaaataatttctctatgtttgacttttaaagaaatattgaggtgttagtagtgacggaattgggacaaaagctgaaagaaacaagagaagcgaaaggcttgtctattgatcagctgcatgagattacaaaaattcaaaaacgccatttagtggcaattgaagaaggcaattatgatgtattgccaggagctttttatgcgcgtgcattcattaaacaatacgcagatgcggttggattaaatggagaggaactgcttgtagaacatcagagtacgataccacaatctgaaaagcgtgaagttccacaagtatcaacgggacaaaaaacacaagaaacaatgcaaaaatcttcatcatggccaattgcagatcacatgccgaaaatcttagttgcgctgttagtcatcgcagttggagtggtaatctggtttgtgtttcaagcgttaactggaaaagatgatgaaaaagttccaagcgctcaaagtgagaaaattgaagttcaaaaagcgaaagattctccgttagatacgaagaaagatgaagtgaaagcggaagagccaaaaaaagaggaaccaaagaaagaagaaccaaagaaagaggagcaaccagcacaaccaactggacagcaagaagtgaaagtagttggaacaactggaaaggtatctactttggaaattcataataataaaacattagaactggaaatttcagctaagggtacaagttatgtagatgttaaggatgatgcgggtaacgaaattctaaacactacagtacaaagcggtcaaacagagaaacgcgatgtatcaacattaaaagaagtacgacttaatattggaagtgcaccgaatgttgaaattaaactgaatggccaagtgcttgctttcccgttagatccacaaaaagaatatcaccaaagattggtgattaaaaaccaagggatagagcaaccagcacaataacagtcatcgcttcgatgactttttttcgatgaacaaatgtttttgatatgatggaggaatagctgtgaatttaccaaataaaattacaatatctagaatcttcttaattccaatttttatggtaattatgttagcgccctttgattggggttcatacaaaattggtgatgttgatttgccaattcaacatttagtgggggcacttatctttatcattgcttcagctacagattggattgatggacattacgcaagaaagtataatcttgtaacgaatttagggaagtttcttgacccgttagctgataaattgcttgtttcggcagcacttattacattggtagagatgcaatatgtaccggcttggattgttattgtaattatcagtcgtgagtttgcggtaacaggtttacgtcttgtacttgctggaacaggggaagtagttgcagcaaaccagctaggaaaaattaagacgtggacacaaattattgcaattgcagcatatttattacacgatgtacctttaaatttaatccatattccagttgcagatatcttcatatggattgcattaatctttactgttatttcaggatgggattatttctggaaaaatagagctgcttttgtaaactcaaaatagaagtttatgggggaattgggatgaatgctgagattattgcggttggaactgaattattacttggacaaattgcaaatacaaatgcccagtttttatctgaaaagttagcttcaatcggaattaacgtgtactatcatactgttgttggtgataataataagcgattgcaaaaggcgattgaagctgcggaagaacgtgctgatatacttatttttacaggtggattaggaccaacaaaagatgatttaacgaaagaaacgatagctgctagtttagatgaagagcttgtgtatgatgaaaaggcattagccttaataagtaattactttaagcgtacaggccgtgaatttacggagaataataaaaagcaagcgctcgttttaaatggagcaacagtatttgcaaatgaccacggtatggcgcctggtatgggggtaaataagaacggaaaagtttatattttattaccagggccgccaaaagaaatgaaaccaatgtatgtaagttacgtagagccttttttacgtaattttacaacaggagaaaacatttattctcgtgtgcttcgtttcttcggtattggggagtcccaattagaggtgaaagtgcaagatttaattgatggacaaacaaacccaacaatcgccccgttagcaaatgatggagaagtgacattacgtttaaccgctaagcatcaaaatgttagcgaagcggagaaattaattcaacatgtggaagatttgattttagaaagagtaggagaatttttctacggatatgaccaagaatttttgcattataaggcaatcgagttattgaagagaaaagggttaactttagcgtgtgcagaaagtttaacaggtggtctttttggaaatcaagtaactgaaaacgctggtgtttcttctgtatttaaaggcggtgtcatttgttatcataatgatgtgaagcaacatgttttacgtgtgcctgaagaagtgttgcatactgatggtgcagttagtaaagaatgtgctcgttatcttgctgaaaatgttaaggatgtattaaaagcggatatcggaattagtttcactggggtagcagggccagatgcttcagaacagaaagaaccaggaacagtatttgttgggctttcgattaaggatgaaccaactgtagtctttcctcttaatttaagcggaagtcgtcaacaaattagagaacgaacagcaaaatatggattttatcatttatataaaaagctagaagagatataagtttcttctagttttttttacggttaaatttagatattatttgatagaaaataaaaaaatcgaataaatgttcgatttttgttggcaaattgaattgaaaataggtataataagattagcaattcagttaaggaggaattttgaatgagtgatcgtcaagcagcgttagatatggcgttaaaacaaatagagaagcaattcggtaaaggttcaattatgaaattaggagaacaagcggagcgtagagtttctacggtttctagtggttctttagcacttgatgtggcactaggagtaggcggatatccacgtggccgtattatcgaaatttacggacctgaaagttcaggtaaaacgacagtttcattacatgcaattgcagaagtacaacgtcaaggtggacaagcagcattcattgatgcggagcacgcaatggatcctgtatatgcacaaaaattaggcgttaacatagatgaattactattatcacagcctgatacaggggagcaaggattggaaatcgcggaagcacttgtacgaagtggtgcggttgacattatcgtaattgactctgtagcagctcttgtaccgaaagcagagattgaaggcgatatgggtgactcacacgtaggtttacaagcacgtttaatgtcacaagcacttcgtaagctttcaggagcaatcaacaaatcaaaaacaattgcaatctttattaaccaaattcgtgaaaaagttggggttatgttcggaaacccagaaacaactccaggtggtcgtgcgttgaaattctattcaactgttcgtcttgaagtgcgtcgtgcggagcaattaaagcaaggtaacgacattgttggtaataaaacaaaagtaaaagtagtgaaaaataaagtagcaccaccattccgtgttgcggaagttgatattatgtacggagaaggtatttcaagagaaggtgaaatcttggatatggcttctgagcttgatattgttcaaaagagcggtgcctggtattcttataatgaagaacgcctaggacaaggtcgtgaaaattcgaagcagttcttaaaagaaaatacagatttaagagaagaaattgccttctttattcgtgagcatcacggaattagtgaagattctggtgctgagggcgcagaagattcaactcttcttgattaaaaaaataaaagacacggtctcgtgtcttttatttttttatctactattaaggagcgtaatactatagataaaaatattttttgacttcaaatgggttgtgtaaagaaggatatttaaatattttaagtaaagaaatgggaattactaaggttttccagtataataggctccttactttttaaatttaggtcacattcaaggctgaaggtaaagaaagtaaaagtagacaacgcttgacaatgaaaattacgatagatacaatgagaatgtatattttttcttatatacgatatactcttctcaagaagagaagtaatattcggagtaaggtttaaatcttaccgaaataataatatgacattttaattgtgaaatgaagaaagtcccttaaaaaaagcgggacgacggtctttgctgtatgttgtaattcaatgtacatgccgacagtcttttttcattcatagcaaggggaggtgaaatcatgagtagtacagtttggatactcatctccattttgcttgcaacaacagtcggtgcagttgttggcttttttgttcgaaagtctattgctgaagcgaagattaatggtgcggctaatgaagcgaaacgtattctagacgaagcgaatcgtgaggctgaagcacttaagaaagaagcgcttttagaagcaaaggatgaaattcatacacttcgtacagaagctgaattagaaattcgtgaccgtagaagcgaattacaaaaacaagaaaatcgtttaatgcaaaaagaagagaaccttgatcgtaaagacgaaacgctcgataaacgcgagcagcagttagagaagaaagaggattctcttgtagcgagacaacaacagattgaagagttggaaagcaaagtgggagagttagttcaaaagcaacaaacggaattagagcgcatttccaatctgacacgcgaacaagcgaaagcaattattcttggtaaagtagaaaatgaagtttctcatgaaatcgctgttatggtaaaagaaagtgaagttcgcgcgaaagaagaagcggataagaaagcaaaagagattttatctcttgcaatgcaaagatgtgcagctgatcatgttgctgaaacaaccgtttcggttgtaaatcttccaaatgacgaaatgaagggacgtattatcgggcgtgaaggtcgtaatattcgtacgttagaaacgttaacgggtattgacttaattatcgatgatacaccagaggcggtaatcctttctggattcgacccaattcgtcgtgaaacagctcgtatcgctcttgataaactagtacaggacggacgtattcacccagcgcgtattgaagagatggtcgaaaaatcaagacgtgaagtggacgagtatattcgcgaagtaggagagcaaacaacgtttgaagtgggtgttcatggattacatccagatttaattaaaattttaggtcgtttaaaataccgtacaagttatggtcaaaacgtcttaaaacactctatggaagttgcatatttaactggacttatggcggcagagcttggcgaggatgaaaaactagcaagacgtgcaggtctattacatgatatcggaaaagcgattgaccatgaagtagaaggaagccacgttgaaattggtgttgaacttgcaacgaaatataaagagcatcctgtagttataaacagtatcgcatctcaccatggtgacacagaaccaacttctatcattgcagttttagttgcagcagcagatgctttatcagctgcaagaccgggagctcgtagtgaaacacttgaaaactatattcgtcgtcttgaaaagttagaagagatttcagagtcttatgaaggcgttgaaaaatcatttgcaattcaagcaggacgtgaagttcgtattttggtaaaaccagatacaatcgatgacttagaagctcatcgtttagctcgtgatatccgaaaacgtattgaaaatgaactggattacccaggacatattaaagtaactgttattcgtgaaacacgtgcagtggaatacgcaaaataaagtggtgaaacaccactttatttttttgtgttggaattggataaaataaagacagttagttatatagcataaaagtgaagcaaacttataataaagatattataaggaatttacttgatgctatagcaataaaaaatgcagtacatagaaagggtaagacatatgagaatattatttgttggggatgtagtaggatctcctggtagaggtatgattcaacaatacgtaccggcattaaagaaaaaatatacacctacagtaacaatcattaatggagaaaatgcagcaggtggccgtgggattacagaaaaaatatatcgaaactttttagagtgtggggcgcaggcagttacacttggaaaccacgcttgggataatcgtgaagtatttgaattcatcgatgatgcaaaatatcttgcaagaccagctaacttcccagaaggaactccaggaaaaggacttatctttgtgaactgtaatggaacagaagttgcagttattaatttacaaggacgtactttccttcctccaattgattgtccattccgtaaagtggatgaattaattaatattgcgaaaaaacgtacgaatattatatttgttgatttccatgcggagactacaagtgaaaaacaagcgctaggttggtatgtagatggacgtgctacagcagtagtaggtacgcatacgcatgtccctacagcggataaccgtattttaccaagcggaacggcatacattacagatgttgggatgacagggccgtatgacggaatattaggtatggacagagaagcagtattgaagaagtttttaacaaacttaccagtacgatttgaagtaacaaatggcagaacgcaattaagtgcagtgttaattgatgtggatccaaatacaggaaaagcaaagagaattgaacgtattttaattaatgacgatcaaccattttttgagtaaatttccgtcaaattttagataagttattatattttaattttttagaaaaattacgaaaatttagcaggaatacgcgccattcctcgtgaatataagttaaagtgaaataattgctaatactttttaaagaaacgaggaggaaacgcggaatggaaatattaaaagttaaagcaacgtcggtccctaattctgtagctggtgcacttgcaggtgttattcgcgaacgcggaacagcagaaattcaagctattggtgctggtgcattgaaccaagctgtaaaggcagtagcaatcgcaagaggatttgtagcgcctagtggtttggacctgatttgtatcccagcgtttacagatattatgattgatggcgaagagcgtacagcaataaaattaattgtagaacctcgttaagtttaaacaacctgtttgcagtatgcaaacaggttgtttttataatggaggaatgaaaatgaaaatttttgatgctcattgtgacgtgcttcttcagttatggagtgcacaagggaaaaggaattttaaagatgattcacaattacatattacatttgaacagttaaagagaagaaaaggaagtatacaatgttttgctatatatgtaccagaaacagtggcatatgaaaaccgatttgaagtagcattacaaatggtagatattttttataatgaaattttatccctacaaggtgtgaagtttattcagacaaaagatgatattaacatattaaaacaggacgagattggagcgatattaacaatagaaggatgcgaaacaattggaaaagatgcaatgaaattacggttgttgtatcgcctaggagtacgttcttttggactaacatggaattatgccaatctcttagctgatggtgcgctagagacacgtggggcgggtttaacgacttttggtaaacatgttgtacaagaactgaatacgttacatgtatggactgatgtgtctcatttgaatgaaagaagtttttgggatgttatagagattgcaaaaaatcctattgcttcccactcaaattgtatgaaactttgcgagcacccacgtaatttaaacgatgaacaacttaaagctcttataaagcgaaatggcatgattggtgtcacttttgtaccgcagtttctaacaaatgaaaaacaagcgaatgtagcagatataataaaacatatcgaatatatttgcttgctaggtggagaaaacaatatagggtttggttcagattttgatgggattgtagatacagttgtaaatgtatcagcgtatcgagattatgaaaatgtaatgaatgagctttgtaaacactatgctgcatctactgtagaacgatttttatatgataattttgtagaacatatgagtttttaaattctgatttaaaattcagaaaaattaaaattaattcatttgattttattgctttttttaagacctaatactagaatgaaaaacaaaatagctttatactaaagattcagggaaatcagaagaggcataatttgcgtccgttgtagtttatttgcataaaaaatgctaaactattactgtaaaaaaatacactacaatgaatgcagccaaaaggggtgtaggagatgattagtcaactttcatggaaagttggaggccaacaaggtgaaggaattgaaagtacaggagaaatcttctgtattgcattaaaccgattaggatattacctatacggttaccgccacttctcatcacgtataaaaggcggccatacaaataataaaattcgtgtaagtacaacagaagtacgagcgatctcagatgatttagatattttaattgcttttgaccaagaaacaatcgattttaatttccacgaactacgtccaggtggaattgtagttgcggatgcgaaatttaatccaacaatacctgacaatacagatgtaaatctatatgtgataccgtttacagatattgcttcagaattaggcacatcattaatgaaaaacatggttgctgttggagcatcaagtgcagtattaggattagatgaaacagcttatttagatgttgttgaagaaatctttggtcgtaaaggagagcaagtcgttcaaaagaatatggacgcaattaaacgcggctctcaatatatgaaagaattactaggtgagaaagtaaacatgatgcagcttgaaaaagctgatggtaaaaaacgcatgtttatgattggaaacgatgcaatcgcatttggtgcggtagctggtggtgctcgttttatgtcagcatacccaatcacacctgcatcagaaattatggaatacttaattaaaaaattaccgaaagtcggcggaacagtaatccaaactgaggatgaaatcgcagcttgtacaatggcaatcggtgcaaactatgctggtgttcgtacattaacggcatctgctggtccaggtctttcattaatgatggaagcaatcggtttagcaggtattacagaaaccccattagtaattgttgatacacaacgtggcggcccaagtacaggattaccaacgaaacaagaacagtctgacttaatggcgatgatttacggtacgcatggtgaaattccaaaaatcgtaatggcgccaagtacagttgaagaagctttctatgacattgtagaagcatttaacttatctgaagaatatcaagttcctgttattttcttaacagatttacagctttcgttaggaaaacaaacagtagaaccacttaaattagataaagtagaaattcgtcgtggtaagcttgatttagaagcagaattaccagaacgtgaaaataaagcatacttcaagcgttatgaagtaacagaagacggcgtttcacctcgtgttttacctggtatgaaaaatggtgttcaccatgttacaggtgtagaacatgatgaaactggaaaaccatcggaatcagcaataaaccgtaaagatcaaatggacaaacgtttccgtaaaatggagaacttgaagtttaatacccctgtttataaaaatgttaagcatgaagaagcagacgtattgcttgttggatttaactcaactcgtggtgcgatcgaagaggcaatgacgcgtttagaacaagagggtatgaaagtaaaccatgctcatgtgcgtttaattcacccgttcccaacagctgaaatcgatccacttgtgaaaaaggcgaagcgtgttgtagtagtagaaaacaatgcaacaggtcagcttgctaacattatgaaaatgaatcttggtaatggtgagaaaatttctagtcttttaaaatatgatggaaacccattcttgccgaaagagatttacaacgaatgcaaaaaaggggttgtattaaatggcaacatttaaggactttcgtaacagtgtaaagccaaactggtgcccaggttgcggagacttctcagtgcaagctgcaattcaacgtgcggcagctaacgttggcctaaatccagatgaacttgctgttatttctggtatcggctgttcaggccgtatttcaggttatattaattcatatggtgtgcatagtattcatggtcgtgcccttccaattgcacaaggtgtgaagatggcaaatcgtgatttaacagttatcgcttcaggtggtgacggtgatggatttgcgattggtatgggtcatacaatccattctattcgtcgtaatatcgacattacgtacatcgtaatggataaccaaatttatggattaacaaaagggcaaacttcaccacgtagtgaagctggatttaaaacgaaaagcacaccacaaggttcaattgaaccatcactaaatgtaatggaaatggccttgacagctggtgcgacatttgtggcgcaaagcttttcgagtgatttaaaagaattaacacaaattattgaggctggtattaaccataaaggattttcattaattaacgtatttagcccatgtgttacttacaataaagtaaatacttacgattggtttaaagagaacttaacgaaactaagcacagtagagggatatgatccatctaatcgcatgatggctatgcaaactttaatggaaaataacggtttagtaacagggttaatttatcaaaatactaagcaaccatcatatcaagaacttgttaaaggctatagtgaagagcctttagtgaaatctgatttaaatatggatcagaaaatgtttgatgagcttgttgctgaatttatgtaatgtaagaagaggaggttgccgatttggcaacctttttttatatacaaaaatatagggtagtcttatttacttggaaaattcagaatgataaaataatatataaatcgttgtatgaaaatggcaagttcattgcttatgaaatgtaagataataaagggcctctttattgttaaaattggcgaaacacgtcgtactatggtaatgtttatagggataaagcaatatgcttttgggtaggacaacaagaaatgataaaaagggaatgtctatttgcgtggggaagacttcattcttatgaatgattagattgattactcaagtttcaaaggacaagttatctctcaagctatctaaccatttttgaggtgagtctaagcgcattaaaatggactatagagtgtgtatagttaagggtgaaaggagattaccgatgaacgagcaacaacgattagcaagtcaacaagcaaattcctctacgaaaaaagaagagaaagattatagtaaatactttgaaagtgtatatcaaccaccttccttaaaggatgcgaaaaagcgtgggaaagaagaagttaaaattgaacgggattttggcttacctgaagagtttcgcaattttggtacaggaagaaagttctatattcgtacatatggttgtcaaatgaatgagcatgatacggaagtaatggcaggtattttcacagcacttggatatgaaccaactttttcaactgaggatgcagatgtagttttattaaacacttgtgcaattcgtgaaaatgctgaaaataaggtgtttggtgagctaggccatttaaagtcactcaaacgaagaaatccagaccttttaattggtgtatgtggttgtatgtctcaagaggaatctgttgtaaataaaattatgcaaaaaaatcagcatgtagatatggtatttggaacgcataatattcatagattaccgtatattctaaaagatgcgatgttctcgaaagagacggtagttgaagtatggtcaaaagaaggtgacgtaattgaaaaccttccgaaagtacgtcgtggtgatattaaagcgtgggtaaatattatgtatggctgtgataaattctgtacgtattgtattgtaccgtatacacgcggaaaagagcgaagtagacgtccagaagatattatccaagagattcgtcatttagctgcaaatggttataaagaaattactttacttggacaaaacgtaaatgcatatggtaaagactttgaagatatagaatacggtcttggcgatttaatggacgaacttcgtaaagttgatattgcccgtattcgttttacaacgagccatccacgtgatttcgatgatcacttaattgaagtgcttggaaaaggtggcaacctagtagaacatatccatttaccagttcaatctggaagtacagatatgctgaaaattatggcacgtaaatattcgcgtgagcattatttagaacttgtaagaaaaattaaagaagcaattccagatgtagtattaacaacagatattatcgttggttttccaaatgaaacagatgagcaatttgaagaaacgatgtcgttatatcgtgaagtagggtttgatactgcctttacatttatttattctcctcgcgaaggtacaccagctgcaaaaatgaaagataatgtaccgatggaagtaaagaaagaacgtcttcagcgcttaaatacactagtaaatacgttggcaattgaaaagaatagtcgttacaaaggtcaaattgtagaagtgttagttgatggggaaagtaaaaataatccggaagtacttgcaggttatactcgtacgaataaacttgtaaacttcgtcgcttcaaaatctttaattggtcagcttgtgaaagtgaaaataacggaagcaaaaacttggtctcttaacggggaattagttgaagagccgattgaggtgaaataatagatgaaagtatattcgaaagatgacattgttgaacaagcgaaagaattagcaaaaatgatttctgaaacagaagaagttgatttttttaagaaagcagaggcgcaaattcataaaaatgaaaatgtaaagcgcgcaatcgatgaaattaaagcactgcaaaaacaagcagtaaacttgcaacattacgggaaatgggaagctttaaaaaaggtagaagctgaaattgatgcattgcaagataagttagacagtattccagtcgtacaacaatttaaatcttcacaaacatacgtaaatgacttattacagttagttgctagtacaatttctaacaacgtaacagatgaaatattaatttcaactggtggcgatgtactaaagggtgaaactggcgcagcggtagaaagtaaaaaaggaaattgtggttgttaaagagatgtcatattgacatctctttttttttgtggattaaacgtaagttcttctcaaaaaaagaatgacacattccgctattgtcacgcatatgattaagtgaatagtgattgaggagggttacgaatgtccgaatttagagagattattacaaaagcagtggttggaaaaggacgtaagtatacaaagtcaacgcatacatgtgaatcgaataatgagccaacaagtattttagggtgctgggtaattaaccactcgtacgaagcaagaaagaatggaaaacatgtggaaattgaaggtttctatgatgtgaacacttggtattcatttgatggaaatacaaagactgaagttgtaacagaacgtgtgaactacacggacgaagtaagtattggttatcgtgataaaaacttttctggtgacgatttagaaattattgctcgtgttattcagccgccaaattgtttagaagcacttgtatcaccaaatggtaataaaattgttgtaactgtagaacgtgaatttgtaacagaagtagttggagaaacgaaaatttgtgtaagtgtaaatcctgaaggctgcgtagaatcagatgatgatttccaaattgctgatgatgaatttgaagaattagatccgaactttatagttgatgcagaagaagagtaatagaaagctagggagaagttcttcctagctttttactttacataagtggggctgaatgaacatgattctttatgaaatatgttataatgaagaaagactcctgaaataggagataagagtgtccgtgaaatgcgacatatatgaaaatagattatcatgtaagaattatggaggaaaagtatgactcaatatacgcctatgatacagcaatatttaaaggttaaggcagattatcaagatgcctttttattttttcgcttaggcgatttttatgaaatgttctttgaggatgctgtaaaagcagctcatgaacttgaaattacattaacgagccgagatggcggtagtagtgaacgtataccaatgtgcggtgtaccgtatcatgcggctaaaaactatattgaacaacttgttgaaaaaggatataaagtagctgtttgtgagcaagtagaagatccgaaaacagctaaaggtgtagtacgtcgtgaagtagtacaattaattacgccaggaacgatgatggaagggcgtacaattgatgagaaagaaaataacttcttagccgcattaacacattttgaagatggatcatatgcattagcttgtaacgacttaacgactggacaaaatacagtaacgttattgactggttcagtagaagatattttattagaagtgtatgcaactggttcgaaagaaattgttgttgattcttcattttctaaagatgaactaaacaagttaactgaaacattgaaaatgacgatttcgtatgaagatgcaacggcaattccggaaggattagaacatcttgtgaaaaatgtttcacaagcaaaattaattaaagcagttggacgtttatttaactatgtaataagaacgcaaaaacgttctttagatcatttgcaaccagtagaaatttattatacgaatcaatttatgaaaattgatgtacattcaaagcgaaatttagaactgacagaaacacttcgaacgaaagaaaaaacaggatcactattatggttattggacaagacgaaaacagctatgggtggtcgtatgttaaaacagtggatggaacgtccacttatacagaaagaaagaattgaagagcgtttagaaatggttgaaacgtttgtaaatgattacttcttacgtgaagatttaaaggaaaagttaaaagaagtatatgatttagaacgcttagcaggaaaagttgcatttggtaacgtaaatgcaagagacttattacaattaagacgttcattgcttcaagtaccagctattttagaagcaattagtttgttagataacgcttatgcatcgagattaattcaaggtgcagatccatgtgaaagcttaacagaattactaggaagaagtattcaagaaaacccaccgctttcgattaaagatggagatattattaaagatggttataatgacaagcttgatcaatatcgttacgttagtaaaaacgggaaaacgtggattgctgagcttgaaaaaagagaacgtgatattaccggaattaaatcgttaaaaatcggatacaaccgtattttcggttactacattgaagtaacgaaagcgaatcttgcagcacttccagaaggtcgctatgagcgtaaacagacgcttgctaatgctgaacgtttcattacagatgaactgaaagaaaaagaaacgttaatcttagaagctgaagaaaaaattgtacagctagaatacgatttatttacagcacttcgtgaagaagtaaaagtatttattccgaaattacaacatttagcgaaagtaattagtgaattagacgtactgcaaagttttgcgacagttagtgaagaagaacagtttgtaaaacctgtactgacaacgaagcgcgaaatctttattaaagatggtcgtcatcctgttgttgaaaaagtattgaacgggaaattgtatgtaccgaatgattgtattatgccagagaatatggatgtctttttaattacagggccgaacatgtctggtaaaagtacgtatatgagacaattagcacttgtaacggttatgtcgcaaatcggttgtttcgtaccagcaacagaagcagtattacctgtatttgaccaaatctttacgagaattggtgcagcggatgatttaatttcaggtcaaagtacatttatggtcgaaatgttagaagcgaaaaatgcaattgcaaacgcatcagaaagaagtttaattttattcgatgaaattggacgcggtacatctacgtatgatggtatggcacttgcacaagcgattattgaacatattcatgaccaaattggtgcaaaaacgttattctctacgcattatcacgaattgacggtgttagaagagagtttaaatcaactgaaaaatgtacacgtttcagcaattgaagagaatggaaaagtagtattccttcataaaattcaagatggagcagctgataaaagttacggaattcacgttgcgcaacttgcggagcttccagatagcctaatcgctcgtgcgaaagaagtgttagcacagctagaaggacaggaagaaattattattccaaaacgagtagaagtgaaagtacaagaagctactccagaacctgtagttgtaaaagaagaaatagcagaaatacaggaaacgaaagtagagactgaagaagaatcgcaactatctttctttggaggagaacagtcttcgaagaaacaagaaaagcctctgctagatcaaaaagaaacagcagtactggcgcaaattaaaaaaatcgatttacttgatatgacacctttagaagcgatgaacgaattgtatcgcttacagaaaaagttaaagaaaggatgagtaagtagatggggaaaattcgcaaactcgatgaccaactctctaacttaattgcggcaggggaagtagtagagcgccctgcttcagtcgtaaaagaacttgtggaaaattctatcgatgcgaatagtacatctattgaaatccacttagaagaagctgggttatcgaaaattcgtatcattgataatggtgatggtattgcagaagaagactgtatcgtcgcttttgaacgccatgcaacgagtaaaattaaagatgaaaacgatctgttccgcataagaacactcggtttccgcggtgaggcattgccaagtattgcctcagttagtgaattggaattaattactagcacaggtgatgcgcctggtacacaccttattattaaaggtggagacattataaagcaagagaagactgcgagccgaaaaggaacagatattacagtacaaaatttattctttaatacaccagcacgtcttaaatatatgaaaaccattcatacagagctcggaaatattacagatatcgtgtatcgtattgcaatgtcacatccagaagtatcgttaaaactatttcataatgaaaagaaattgcttcatacgtcaggtaacggtgatgtaagacaagtacttgcatcgatttacagtattcaagttgcgaagaagcttgttccaattgaagctgaatctttagactttacaattaaaggttatgtaacattaccagaagtaacgagagcatctcgtaattatatgtcaacgattgtaaatggtcgttacgttcgaaactttgtattaatgaaagcaattcagcaaggataccatacattactgccagttggccggtatccaattggtttcttatcgattgaaatggatccaatgctagttgacgttaacgtacatccagcgaaattagaagttcgttttagtaaagaacaagaattgctaaagctgatcgaagaaacattgcaagctgcatttaaaaaaatacagcttattccagatgcaggtgtaacaacgaagaaaaaagaaaaagacgaaagtgtgcaagaacagttccagtttgagcatgcgaagccgaaagaaccatctatgccggacatcgttttaccgactggcatggatgcaaaacaagaagaaccgcaggctgtgaaacagcctgcgcagctttggcaaccaccgaagcaagaatggcaaccaccacagtcgctcgtgagagaagaacaaagttggcaaccatccactaaaccgataatcgaagagccaattcaagaagagaaatcgtgggacagtaatgaagaggactttgaactagaggaattagaagaagaagttcgggaaataaaagagattgagatgaacgggaatgacttaccaccgctttatccaattggacaaatgcatggaacatatattttcgctcaaaatgataaaggattatatatgattgaccagcatgccgcgcaggaacgtattaattatgaatacttccgtgataaagtaggaagagtagcgcaagaagtacaagagttacttgtaccgtaccgtattgatctatctcttactgaatttttacgtgtcgaagagcagttagaagaactaaaaaaagtcgggctatttttagaacaattcggccatcaatcctttatcgtccgctcgcatccaacatggttcccgaaaggacaagaaacagaaatcatcgatgaaatgatggagcaagttgttaaactaaaaaaagttgatattaaaaagttacgtgaagaagcagccatcatgatgagctgtaaagcatctattaaagcgaatcaatatttaacgaacgatcaaatatttgctttactggaagaactacgtacaacaacaaacccgtacacatgcccgcacggaagaccaattcttgtgcatcattctacttatgagttggagaagatgtttaagagggttatgtagagtgaatagattacatttcaaaagggagcaacatttactgttgctcccttttaatatgtagatttaattgtaaacgagaatatggtggagtaattttgtagtgtatttcttggttgcgttaacttaaatttatctatgtataaaaaagcgctgtatacagcactttttaaaaggtgcatgaattgtatcattactaactaaataactatgcatggccaaatgttgcttcttatttagccaattgtcataaggatctatacaattacttatttttattattattaattttttcagtgtatagaacttgctctttatagtgcttcttaattgggaagttatgtgtacctgtgccgttcttgaattttttgtcaatggggttctttagaggaactgttgtagtttcagtaaattcatatgggtaatttattttagatttatcttcaaacatgaaaatgcctccttttaggatctcctaaattctttactataacatgatatgcatatagatattttttggactagttatttatataggttaatggaatttaattacataactaatgaaacattttaaaggaaaacaatttgagaaagaaatggtatgatagatgttggctcctattgttatttttttgtttaacagcacagtgaattgtgcatataaattcattatagattgtttttataatatggtttatatggggttttcctgataatataatgtggaatattatagtgttattaggttattaggaacatctaatgctgtttcataactgaaagggaattgaaaaaaaactgaaacttttctcataaaaattcaatctaacttgaaaaatgaaaggaaaatgaaattttccaaaagatattctttgttaagataaaaagcatacatacaaaaagcattgacatatcttaaaaatttattttcaagatatagtgggggaaaagatgagattagaaaaacaattaataaaaaagatgtattatgaaacgttcctaatggagaatgaaacaaaaccaactcttgacgtacttggacaagcttatgtaaacgaagaaaaaaatgagatttctgatgggtcttatattcgttttgcacaaggtgaattttattatcgtcatcaagattttgaagcagctatttttaaatgggagaaggttagtaatgaattagcaccatgggcacaaaaaaatattgcggatgcttatttcgaacttaatcaattaccatatgctgaaaatatttatacttccattactactgataataaaatattgatgaccgaaattagattacaattactttctctttacattgagcaaaataattttgattcagctttcggtgttattaaagaagcagtttctttaaatcctgattatccgaacgtcacaaaaattgcccgttccttttatgaggaacagcaagattttgatagtgcagtagagcttgctgtgaatgagttaattcgaatagagtcgtatccgtggtttgaggtgttaaaaggatatatcgataaagggtttactaaacatatttcaccagactatttttatgatgcattagctacattaaataatgtagatcaagtacaatttacacaaatggtttcagcactttggaacagttataaagatgaaccaaattatttattatggcttaatacaataaatgaatttttcttacatattgaaatacattcgtccgatatatggaacaaagtttctgctctttacgaagaaacgtactttacattaattcaaggtcaatatacgcttagacaattagacgatatcataccaaatctgttagcaaactggttaaaggtagtcaatccatcttatgctgtatttccatctgcagctgtattggcatgggatgagattttcccttccaaaatagattcagcaaatatagaacatgcggaaaacttactgtcacattctattaatcatgtaaatggcttagagtacagcttacacctttttgaatctattacacagtgggcacaaaagcagaatatagaaataggtcaccgatttaaatggttagttgacgagctcgcagatttaagaacaaatcgtattttagtaacgggaacttcagggaacggaaaaactacatttattaactctatattaggagaaaatatattagaaaaatcaatttcaaatgtagtagttttaaaaaatgatgctcatatagaaataaacgctataacagactcagcaattacaacaacggaagatgtctctgattaccataatatgatgtctcagcaccatcaaacatatagagatagagcgtgtgttgaatttaaattaccatgcagatttttaaatgaaaataaacttacatttgtagtgacacctggctttaatagaaataacgacactagagatgaaatattcgaatatttaaattctgtagacgaattactattcgtattgaatgcggattcaccttttactgataaagaacgtgatattttattaagtattcaagaacatacgccaaatttacaaattcattttttattaaataaaatcgataacatttacagtgaagcagaagtgaaaagggtattacatgatacggcaacgagaataaacacatatttcccgtatgcgagaattttcccttattcctcgttatatacaagtagtcaacaattaaatggtttaactgagtttattcattttaactttaatcataaaaatatcgatgcagaacgtactgaaaagttattatttttcattcgaaaaacaattacatatcttttggataaacgtgttgagaaagaaaataacctggtggatgctattaattggaatgaagatatgctagtgaaactaaacggtagcattaataaccttactgcatttgaaagggaaaaaattcatttcattacacaatcatatcgttcaatgaagactgaaattacaaatgatcttaccgaaaatattccgaagatattaaagagctgttctaatttaattagtgaagaaagtgatttcgggcacatggatacggaactaaataaagcaatgaatgaaagagtgcataaatatttagaacaaactgtattacctaatcttgctctttctatgcaaaattggattgcaacttctaataatgagcttcttcaaagtcaaacgtatttagaagaacttagtgaagggcttaattcactatttggagaaaataaaatacagttagaatgtgactttaaagtgcttgatgactggcgcagagatactgacaggatgacgactagaatacaaatggatgaagtaaatattttacgtcgatttacgccagcacaatttttactaaaaagtgccggtaaattatttggagttcttcctaaaaataaatctatgctatataacaaatataaacagtatgtagaaaatgaagattatactgaagtaacggcttctattatgaagaaatttttcttgcaatttgagctgtttgaaaacacacaagagagggatattcatatattctttaggaatccatttaactccttaaagcaagctgtagaaaatacgcaattagaaatacaagaaaaacaagagatgttacataaaatgaaatcaaatcctgaagtttatcatgattctatcatgctctttgaattgagattgcgtcaatgtgaagtaattttaaatataggtgatgataatacctatacagatgtagctttagaaacaagtgtagaataaaagtaaaagggagcaactgtaataagttgctcctttttcatatagattatttttctgtttctttaattttagtttgtacttcgccagttttaattttattgctttctgagaaacgtaataaatcgccttcaataattttgtcagacattcgtaattcattttgtgcacgtttaatgagggcttgagcttctttttttggtaaatctacaatttcacctgttatacggtcgtagaaagtgttgtttttgtatgcatacttatctgtaacgaagctaccatcacgtaaaacaacaaagccagtatattcatctgaaaacatatcatggccaaaacggatatcattcgtagaatcaacacctaataaatttagaatcgtaggtttcatatcgatttgtcccgtaggctttgaaatagtttgaccttctgtttgtccaggaatatgaatatataaaggtgtacgttgtaaatttaaagtatcaaattctgttatttgatctttttctaaaaactgtgccattgcacgattatgtttttcggaaattccataatgatcaccgtataacacaataatagaattatcgtaaagcccctcggcctttagacgttcaataaattttttaatggattcgtctaagtaacgtgctgttacgatgtaacgatcaaatacgccattaccagagttgtatggttcaatgaattttgtatcttcatcatacgtaaatggataatggtttgttaaagtaaggaaacgagcatagaatggttgattaacagtttttaatatatctactgattgatcaaagtattcgatatcttttaatccccaatttaaatttgtttctggtgtaattttgtaatcaagctcattatagtaacgatcataaccaagagcagagtacatgatattacgattccaaaatgttgcgttattcgcatggaatacagaagtgaaataaccttgctgacgtaaaatttctggagttgcagtataatcattgttaccgtgtgtgaagaatacagctcctcgatttaatggatacaacgacgtatcgattagaaattctgaatcggatgttttcccttgaccagtttgatggaaaaagttatcaaagtaataactttcatttatgaattcatttaggaatggtgtaacttcttgcccgttcactgatgcgcctattaagaaggtctgcaaggattcaagagtgacgacaattacgttttttcctttcgctgcaccaaacatattagggtttggctcgctttgatttgcttttacgtagttttcagtttcttgtaatttactactatcagcaagtgctttttgtgacccagcttttacttgcagtgttaagtcatatacttggtgagtatataagcctaaatttttgacaagcatgactcggtcgaatgatcttgttaataattcagggcgctctttttctgcaagatgtagattcgcaaagaatacaccaatcgttaaaagaaagtataacaagcgcgtagaatgagttacacgttctgttttaaagaccaatgatttcttttttaataaaataaagaagaaaacaatgtctacgaatgcgagtataattttgtagtttaatatttctataatactgccgcctaattggccaaagtttgaggtttgtccaagtactggtaatgtaacgaaatcactataaaaatcatagaacattacatttccaacaagcacgattgttaataagaaattaatacagagcgctatataatttcgcttttcaccagttgcaaataatgctaatccaacaaatgctaatgatgcggctagagggctaataaacaaaatgagctcttgcgttgaagactcgatttttaaatcaaaactgaatcgcgtaataagatatgtttttaaccatactgctaaagccattattataacaaaacttatattttgcatttgtaaatttattttgttcttcatttttacaccttctttatataatttatttaactaaagttatatattatgtttttataactattagactgtaatgaaccatttagactttgttttctaaagggaataatttgaagtattcatatatatacaatggggatttttaaagcgtagtagcataaatataactcttttttgagaaacaggcagaaaaagtcatagttgtagtgaaattgacttatagacatcctaccatattaaacactatgatgatgttacaaaatatcgaacaaataaaagtgaaaatggatagagacttttaaaactgttgacattcaatttattagaattgaatgccaatcgttttaaatatacagttatattacatatgtattttgtaaaatcccgattttttgtcggttaatcattagcagggaaggataggggtcttattaatatacttttactatatataagtaaagtgttttgaaattgaaaatatttgactgatattttaatgatagaaattaaatgtcagataagtactttccaacatacagaccacttgcagctgcttgagataatgaatgcgtaacgcctgaacaatctccaattaaaaatagcccatgtatactagtttcaaaatgattattaatttttatcgtaggagcatagaactttccatcaattccatatagtaaagtatgttgatcgataggctcctgtataaattgttctaagcgtaataaaaattcttttagcccttcaatatatgattgaggaatttcttgattcaaatctccataatccccctgtagtgtaggctgtatacgattatgctccatgctgttttccaccgtaggttgtttctttagtaagtcctctaagcgctgtataacaatccgatctcgtccttggttaatgccttcaataattgaacttgcgtatgcatttgcttctttgagagttggaaaatagcgaggaataaataaagtgaaatttaagttagaagtgccagttccttgttcccgaaaattttgaccgtcaggcataactaaaccttcttcgtactttcgaatgatgcggccttgtggattcatacagtaagtagttgctgtgaaatgctcaccttgataagaaagttttgtttcaaaagtatcttttaatatagaacgtaattgatgttctttcatttctactctaattcctaaatctacacgtgtttgctcctgagaaatatttagggaactgcatatttcttttaaccaatcggccccagagcgcccagttgcaaatacaagttgcttagtttgaactgttccttgatttgtctctattgtaaaatgatcttcctgtttcagaatatgttgtacatctatatgaaattggatctttattttcgtcagtaaaaattcatagagctgctgaaaaatgttactggaaagtgtagtaccaagatgtcttacttctgttgttagcatttgtaaaccacacgcttcagctctcttagtgagacttgaattttcagtagaatattttgaaaccgaacttccaccaaactgacatagaatttcatctacttcagccatgagttgtataaaaccctctttaccgacttttttctcaagttctccgccaaatccgtttgtataattaaatttcccttcagattttcctaaaccaccaaacccgaaatatttatcacatgtagtacaattacacacttttccttcgtctaaaggacaatggcgatcttctagcgctttacctttatcaagaattaaaacttttttgttacttttagctagtgaataagccataaaaatgctacttactccagcgccgataattgtaacatcatacatattcttccacctgctaacgaatagtttgttttttatttttctagtgtataacaattttatgaagttaagaaatagcttttattaataaagtgggagtttttgaacttgatgctttattaatttctacgagtggcggagtaaatacaaaaatttttatttgaaagaagaaatagtttaaaaaataactatgtcatatgattaataacatcttacatagaaaaaaaacagaccttttaagtgaagaggtctgttaatgattttaaatcttatttagcaaacacatgattaccaattactgctactgtctgacgtgtcgtaatccacttgtctgttgatgtttttggattgtagaaataaagccagtcagaatgtactccatttgtggagatagcctcttctacagccatttttgcttctgcgcttgcaggctgattaattcttccatctgtaacaggagtaaatgcatatccgtatttaataggttcataaataacgcctgttattgtatttggaaaaccttttgcatttacacgatttagtataactttcgctactgctacttttcctttataggattcgccacctgcttcagcggtaactaagcgtgccattaagtctttttctttttgtgaaatacttgagttgatttttaaatgttgtcctgtataaagcttgtttccgattgtattgttaatttgttttatagattggacagtgacattgtaacgccttgctatcgtttctaatgaatctcccggttgtacttgataaataatttgtccagaaatgttcgcaggcttggcgttttgaggaacagtgatttcatttgatttcacggaccctggaatatgtaactgttcgccaataaaggtttgatcgtttcctttattattagcctgtttaatggattgtattgaaactccgtattgtttactaatgccccaaagtgtatcgttcttttttactgtatgaatggtagaagcttcagctgtgctttgactacatacgaatgtaattgcagctgcagataaagggattatatgttttagttttagtaatttcattgtaaatcctcctaagaaaaaattaaggtgaaactattaagtaatgtagtttgaaatgtatatatgcgtaatatattaatgtaagtatattagcacatataaaataaataatcactataagtttcatattcgtgtagtgtagagtccgaatatgaaatattgcatatgaaaatacattgaagttcatatttctgattactataatctatttagtagaaagggaatacgttatagaaacgaaatcattatagattaatataatgattaattattaataggaggattaatgcaatggaaatatttcaaaaaatgtgtgcgtcaactgtaatcattacaacacttttaggaacagggggtactatcaatagtgtacatgctgattctatagaacagcagattaaatcagggatagaacaagaaacagataagcaaatcattgtaaaatttaaagcggatttggatttgccatatgaagatggtattgaaaaacaaatacaatctcaaacgaatgataaagtaataaaagatcttttgacagaatatccagatgtaacatttactcgtttattcacatctgtaagcccggaacaaatacaaaaccttgaagtgaaagcacctaatcatgtatctacaagtttattaaactactatattctgcaaaatcaaaatagtgggtatgaagaagaaatagtagataagttaaaggcatcttctttaatagaagatgcgtatatgaagaaacaagagaaaataatgccacctgaagtgcaatcatcaagtgtagctcttaatcctagtaacaatcctagatttaaaaaacaaggttatcttgaagcggccccatacggtattaatgcgcctttcgcctggggaattcaaggcggtaatggaaatggtatcacttttgttgatatggaatacggatggttattaaatcatgaggatttattacatcaaaaaattgagttaatgtctggaagaaatatagatcagcatgtcggtcatgggacgtctgtactaggaattgtatcctctgaggacaatgaagttgggaatattgggattgcgccaaaagcgaaagcaaaggttatctctcaaataagagataatggacagtataatacggctgatgcaatattaagcgctgtaaatcagttagaagctggggatgttttattgttagaggcacaagcatctttcgatggatatggtgataaatatttacctgttgaagtacaaccagatatctttgatgcaattcgtgctggtacagataaagggattgtaattatagaggccggagcaaatgggtggaatgatttagaccagttcaaagatagaaaaggtaagcaagtcttaaatcgtaatagtaaagattttaaagattcgggtgcaattatggtaggagctggctcttcatctttccctcatgaacgtatgtggttttcgaattatggaagccgtattgatgtgtacggatggggagaaaatgtagatacaactacagccgagcaaagtagaagtgctgtaaatctttatacttcaagctttagcggaacatctagtgcttcgccaattattgctggggcagcgactttagtacaaagcattgctaaagaaaatttaggacaaccatatagaccaagtgaactaagagcaatattaagtaaccagagcacaggaacaaaatctaaagatccatatgcagataaaattggtgttttaccagatttgaagtctatactagcaaacttaggctatgaacaaagaaaaccaaacggtgggaatgaattacaagtaacagaaaatgaaccaaataatgagcctagacaggcaaataaagttaactttcatacaccggtgaaaggaacgctacataatagtgatagagtagatgtatttactttccaaattgattcgccggaaaatattaatatttctctactaaatgaacaaaatattggaatgacatgggtacttcatcatgaatcagatttaaataactatgtagcatatggtgaaaatgaaggcaatgtagttaaaggaacttataatgcaaagccaggtaaatattatttatacgtctataaatatgagaataaaaatggttcatacgtattgaacataaaataagtaaaaggaacttcagatgaagttcctttaaatttttctaatttagtatatgtgaatgattttttaactttacttctatgcaatatttcatattgatgaaatgttatttattttttctgagctagcttatattatattcaataagtttgatataaaaacagaaagagagagggataataatgagcaataagaagttaattttgaaattattcatatgtagtacaatatttatcacatttgtatttgctttacatgataagagagtagttgcagctagctctgttaatgagcttgaaaatttgtcaaaatggatgcaacctatacctgataatatcccgttagcacgaatttcaattccaggaacacacgatagtgggacgttcaagttgcaaaatccgattaagcaagtatggggaatgacgcaagaatatgattttcgctatcaaatggaccatggagctcgcatttttgatataagaggacgtttaacagatgataatacgatagttcttcatcatgggccattatatctttacgtaacactgcatgaattcataaatgaagcgaaacaatttttaaaagataacccgagtgaaacaattattatgtctttaaaaaaagagtatgaggatatgaaaggggcagaagattcatttagtagcacgtttgaaaaaaaatattttgttgatcctatttttttaaaaacagaaggaaatataaagcttggagatgctcgtgggaaaattgtactactaaaaagatatagtggtagtaatgaacctggaggatataataatttttattggccagataatgagacgtttaccacaactgtaaaccaaaatgcaaatgtaacagtacaagataaatataaagtgagctatgatgagaaagtaaaatctattaaagatacgatggatgaaacgatgaacaatagcgaggatttaaatcatctatatattaattttacaagcttgtcttctggtggtacagcatggaatagtccatattactatgcttcttatataaatcctgaaattgcaaactatataaaacaaaagaatcctttgagagtgggctgggtaattcaagactacataaatgaaaagtggtcaccattattgtatcaagaagttataagagcgaataagtcattaataaaagaataaagatgatgagagtaagaagcgataaaatatatcgcttctttttcttttccaataaccaacaatataaattgtacttttataatagaaaaaaataaaaacataagatataatcatacatataaaatttgtacctataaattttatatgtatgattgaatttgatttgttgtaatgaaatggaggtatatactatgaagtttccacatgattttttattcggagctgcttcagcttcttatcaagtagaaggtgcatggaatgaagatggaaaaggtgttacgaattgggacgagttttcaaaaattcctggcaaaacatacaatggaacaaatggtgatgtagctgttgatcattatcatcgatataaggaagatgttcgcttaatggctgagatgggattagaatcgtatcgtttttctatttcttgggcgagaatattgccgactggagatggaaaggtaaatgaaaaagggattgaattttataacaacttaattgatgaatgtttaaaatacgggattgtgccgtttgtcactttatatcattgggatttaccattaccgttagaaaaagatggtggatggacgaataaaagaacagcagaggctttcgtaaaatatgcagaaacttgttttaaggcatttggtgacagagttaagcattggattacttttaatgagaccgtaatgttttgtggattaggttatttaaaaggtgcacatccaccaggaatacaaaatgatgttccaaagtattttcaagctactcattatgtattttatgcacacgcgaaaacagttgcggtgtacaagcagctgaaacaatatggtgaaattgggattacacatgttttcttaccagcttatagtgtggatgatcaaaaagaaaatatacaagcagcaaatcatgcgaatgaatatgaaacgtattggtattatgatccaattttaaaaggcgagtatccgtcttatgttgtacaacaattaaaggaaaaaggatggactcctaattggacggttgaagaattagaaatcattaaacaaaatgcagaagaaaatgattttattggcttgaattattatcaaccaatacgagtagaaagatacgatatggatataaagagtgaggaacattctcgagaaaactcaacgcttgctccaggtaactcttcttttgatggtttttatcgaacagttaaaatggatgataaaacatatacaaaatggggatgggaaatatctcccgaaggtttcttagagggattgcatatgttgaaagcacgttacggtgacataaagatgtatgtaacggaaaatggacttggtgatgaagatccgatcattgacggagaaattgtagatgttccgagaattaaatttattgaagcgcatttaaaagtaatgaagcgtgcaattgaagagggaattaacttaaaaggttattatgcatggtcagtgattgatcttttaagttggttaaatggatataaaaagcaatatggctttatttttgtcgatcataatgataacttaaaacgtaagaagaaactttcgtttcattggtataaacgtgtgatcgaaacgagaggggaagagttataacagataaaagagtattttaggagaaagtgtatgagtgcaaagtataaacaaattgcagatgtgttagagcaaaacattcgagatgggctttttaatgaaacgaaaaaactacctacagaagaagcgttgatgaatcgatttgaagtaagccgtaatacgatacgtaaagtaattagtcagcttgtgaatagaggttatatttttcaagtgcaaggtagtggcatgtttttacgcgaaacttctgtaacagattacattaatttaggaagtttacgtggattaacgaaaaatcttgtttcacaaaatattgaaacgaaagtgttagagcttgaagtaatagatgcggacgaagagatagcaaagcagatgcaatgcgaagctggaactaggttgtattttttgaagcgcttaagaattgtagatgctaaaccattctctattgaagtaagttatttcaaaaaggatattattccatatttgaacgaagaaatagcattaagctctgtatacagttatttcattgaagatttacgattaaatattggttttgctgataaagttattagttgtgaaaaagtaaataaagaaaatgcacagtttttagaattaaatgaaggtgatccggcgcttcttattgaaaatacagtgtatcttgtaaatggaacaatttttgagttatctcagtcgatgtttcattatgaaaaggcgaaacttttaaatcgaattaattttaaatgaaaaattattgtgtgaaaaaagcaactggtcctaagtgatcagttgctttttattttttaagtggatgagcaaaaaaacacgaaagtggttggtccgctttttgcaaacatctattatgataagagaagaaaggtagtatgttatcaacgttttaaagaggaaggtttttatgtaagttctttaattaaaatagatgggtcttagagaggtgaaaagacaatgagttttgcaatttcactagtcgttattattgtaattgtatcgctatttgggactgtactagttgcaagaaacgtggaggagaattacggtaagtctacaaaaagaaatgtgaaaaacttatctgcaatctatattcttcttctttttgttctactagttggggtaacatggtatgcggtcatgatctgatagtttgtaaaagaactgaaatgagagtatgaagttggaattttagaagctatcgagtaatcagaaagagaaccattttggatatatccatttacggataagaaaatgtgactaattaatactatttttacggtgaatactgttagtaaaaaatgaggatagttcgttttgaaaggagggaactatatggaatggaaaccaaatcgtgcagataagacacctgtatataaacaaattgctgattatattgaaagaggtatttcttcaggcgaatttccttctgatagtaagttaccttctgagcgtatgttagcaaaggaattacaggtgaaccggagtacaatagtagctgcgtatgaagaattaaaatcacttggagtagtagaacggcaaaagggaagcggaacacgggtgaatacagacatatggggtgtctcacataaacgaataccgaactggggtaggtacgtggaggatggatcgttcttacctaacgtaccactcgttcaacaaattcgaacggaaacacaaaaagatgatttaattaatttagcaagtggtgaactgtcaccagaattaattccaagtgatagatttcgaacaattttgtcggagaaaacatttatggaaaacctcggttatgaccatccacttggaaatgagatgttgagaaaaacaattgcagcacatgttcagcaatataaacaaattgaagcagattcaagctctattcttattacgtcaggagcacaacaggcgcttaatcttatcgttcaatgtttattaaaacctggcgatgcgatcgcgattgaagatccttcgtattgtttttcgcttccaatgtttaaatcggccggtttaaacatatttcatttacctgttgatgagcatggaatgaatccagatgacttaatcgatttgcacaaaaagcatcgcattcgtatggtatttttgaatccagattatcagaatccgacgggtactgtgctttcattagcgagacgtaaaaaaattttagaactgtcttctgagttcggtataccaattgtagaagatgatccgtatagtttaatctcctttaatggagaagtgaacccaacattaaaatcaatggaccaaaatggaaatgttctttatataagttcactatcaaaaattgttgcatcaggattacgtattggatgggtaattggtcctacacgcgtaattgagcgtttagcagatgcaaagcaacaagttgattttggccatagtgtatttacgcagtgggtagcaaatcaatttttagaatcaaaggatttccatacacatattacgatacttcgtggacaattgaagcaaagaagagatgaattaattgcagagcttgaaggaacattgggagaacgagttgaatgtttcgtgccagagggtggaatacatgtatggtgtaaagtaacaggaaagtttgatgaatatcacttattaggtgaatctatacggaatggtgtcgcatttgttccgggcagtgttttaggttcgaaaaatgaatatatacgatttacgtttggtagagcgaatatagaacaaattcaacttggaattaaacggtttgccgacacgctaaatgagatttcataatatggatgtgtgatagtgaaatgagggaaagaaatgaagtacgtgacgcttttacttcaagtaggcgtgctatatgtatttagcctagtgggtacgtggattcaggaaatattccatctatcaataccggggaatttaatagggatgttaatactgttcctgctcctttccactcgcgttttaccgttagaatggtttgagttaggttcggaaaagttaatcgtatttttaccgttatttttaatcccttcgacaacagggctcatggaatacgggtcttttcttttcagtaagggaagtattatattccttttagtagttgcaagtactgtagtaactttgattgtttcagggtatataagtcaattattagtcacatcaaaaaaataaaatcgacaaggtgcacgattcaaatggtcttaattattattactgtagcaatttatttcttggcgacaaagctatataaaaaatttacgtttgcatttacgttaccagtgttaacagttacggcaattatgatttgtttatttttgatttttggtatttctcatcatgagtatagggaaaatgggggaaacattctttcaagcttattgagccctgcaattgtagcattggccatacctctatttaaagagcgaaagatactgatgaaaaatttttcatcgatactaatcggagtagtgataggtatagtggctgtaacgagcatgaatgtagtgattggcggaattttaaatatagataaggaacttatattaactactttaccacaggtagcgacaatgccaattgccctttcaatagcggatcaaattggtggtattccatctatgacttctagttttgtagttgttgcaggaataacaggtgctatgatcggaccaacagtacttaagtttttccgtataacaagtacgattggaaaaggagttggaatgggctgtgcatcacatattatcggtgtgagtcgtttagtgaaagaaggcgagaaagaagcgactatcggttcggtaacgatgattgtaactggaatacttattagtatactaataccgtatggaacgaaatttattttttaaatgtaatggagatgataacaatgacaacatggtttatagttacattatttgtttttggagctattaaagtattagtttctagcatgcccacttctgttgtagaatcaattattagtagatttgaattgcatcaaaagcttgaggcggaaaatacttctatatcgatagatggaaaaaatatagagggagaaatgaaactacaagttattcatgaatttaatgaggcgttgtttttagataaacattatttcccgccgcacggagaagggacaccaatagtcattgatacgaagaaagggagtaaagagattagattttcgctatatagctatgaggaacatgttgatgtcattaagcaatataagaagaaagtcgttgcctatcgtttacgctctaaaagccttcaaacattgacaccattagtaataacggaagagtatgcttaagaagagacctataatggtctctttatttttttatccaattatatacgttccaaataaaagaatgaaaaattatataaccaaataaagaatatgtatggttccaattcgcactatgtacaaataaacctaaactttcagcaatctgttcaaaaaggctagcacaaataccgattgaaataataaatgaaattctagaaactttagataatttttttgaaatgtgtataaagataactgttaaaatcggcagtacgaacaatgtaaaagctatattaaccgaaaatgtggatgagaagggcctagccggaaaggaatatatttgtttatgaacaaaaaaggcatctaagcaagttgcaataatagaagagagaaagattgtaactactaatgctagaaactcattcttcttctcggaggaggacatttttctttgcgagaatggcgatttcaattttttcgagtgttttgcagtagtcttctgtaatttgtccatttatattttcctccttatcaactaagtaatttacaacttgccaatcggtaaaccaatcttcactgtcaacttcttcatgcttcatatctcgccatgcatagatgagtgcagggctgtatatacgataagagccatttcgtaactggcatttcttaattcggcgcttataaaactcacgggaaaaagattcatttacacttgaaaataaatggggccagtaatctttcctagatcctgtatgtggatggtgttgagcccagcttattatttgagataaaacatgtgtatctcgaaataataatgagtacaatctttttccaattaatatccgttcatgtaaggaagtgaaatgtttcattgtatcaccaaatagtaatactttttgtttcttatcattttcgtagaatgggaaaaggatatgattaaactgaaagaaatcaaagagtttaaatccaatactatttagtacagtctttttaaattgtacattttgaattactcttttttctaagtagttttgttcattaataatagttgcaattgctaaagtttttttgttacctgttttccaaaaatggttccacatcgtttccataaatgtagaaacatttaggtgagggagaaggtgaaataacttttgtgatctctttacactttgttcgtaaagtaaaaattgagggtatacatcttggaaaataagccaattccctctttctaaaaaagaaaaaaatatgaattgatctttctctgataaaattctcgtatataaatcgccctttaaatcagtcatattccaaccgccgttacgtgataccatatgcccaagcagtgcccaatgtatttctggatattgaatgtaaaattggtagtatgcgcgtgttcttgtaacattatttttatttagttgttctgtttgtatttttattttgttgatgatgagttgttcttctttcgttaatttatacatggtgtcagaaggaataagtttgcttttttgtttcaattcattttttacgtcgaatagggagagaggcagtgctttggaaggtccgttatatgtatgatttgaattgcttcggtccattccgttacctccctttttcataaatttaaatatgattattggctatgaatcattctatttattttattacgagtataagaaataaatgagcggtgtttttttacaaggaatttatttatcatgcaaacagtataaaaaatcttactgttgtgagatgaaatgaaaaacagaaactacgtttaatagtttctgtttttttattttgtcaattaaatgtaacaaacgacgattatgatttgaatcaattgaaaataattcaataaatattatttaaattgagatgtttcgtaggaggaagaagaatgttaaataaaataattttaattactggtggtacaggttcgtgggggcatgaacttataaaacaactattagaaaaatcaccgaaagaaattagaattttttcaagaaatgaaacggttcagtttgaaatgcagcaacagtttataaatgatgataggttaaaatttattattggagatattcgtgataaagatcaactagtctatgcttgccaaggtgtacattatgtgttccatcttgcagctttaaaacatgttccagtatgtgagtattatccttatgaagctataaaaaccaatatacatggtacgcaaaatgtaattgaagcctctatacagatgcaagttgaaaaagttatatatgtttcaactgataaagcagctgatccatcaaatacgtatgggatgacaaaagcaattggtgaaaaattaatggttcatgcgaatatacaaacgaagaaaacaaaattcatttgtgttcgtggtggaaatgttttaggaacgagtggaagtgtagtaccactttttaaacaacaaattaaaaaatcttcacaagtagggattaccgatgcgaatatgactagatttttcttaacagttgaagatgctgttgggttgttatttaaagccgtatctcaaggtagaggcggggaaatctttgttatgaaaatgccggcatgtaaaataacagatttagcagaagtattaattgaagattccggaaaagaaaatgttaaggtaaaagaggtagggataagaccgggtgaaaaattaagtgaaatgcttctatctgaggtagagagtaaaacaagtataagttttgatcaaaattattttgtggtactaccgactattcctatacaaggacttcaacaatattattcaagctatcctctagtggatgtgaagagttttagttctcaacaagatttacttgcaaaacatgaggtgaaacaaatgctattaaaaggagggtttttgcgatgaaaaaaaatgcgagccttttaataactggtgcaaatggtttcacaggacgccatgcttgccactattttttacagcagggctttcatgtaattcctatgtttcaaaatcgtgcatatggagaaaaaattagaaatggtattacttgtaatttaactaataagagcgaagtaatgaaggtaatgaaacaaataaagccagactacgtattgcatttagcaggaaggaattcggttatagaatcttggacagctgcccttgaatatatagaggttaatgtaataggaacattatatttattagaagcaattaagcaagaagcctcgcattgtagaacattagttataggatctgctttgcaagcagatagtatgaacgaaataaaaatttcaaatccatatagtttaagtaaaacgatgcaagttattattgcagaggcttggggaggattaatggattcaaatattatcattgcaaagccctcaaacttaattggtccaggggaatcgaatggcatttgttcgattctcgcaaagaaaatgatagatatagaatcaggtagaagtaaagccattattgaagtaaacagtttgaaagatagtagagattttctagatgtacgtgatgcgattaaagcgtatcatgtgttattacgagatggaataaatggaaaacaatataatatcggatcaggagtaaaacgatctttgttaaatgtactagaacaatataaagaattaacacagctaaatttttttatagaggaaacagagaaaagtgggagcgactcaaatgagagtttagcaatagaggaaataaaaaggttaggttggatcccagaaattgaatttcatcaatcattaaaagatgtacttgagtatgcgaagtgtagtgacatctgcatgcaatgaaaaacaaaaaagggtgtaaaaaatatatgaatgattatgaaataatagataatcaaaatacgctatttctttcaattgttgatgcgttggattggagagatgaagaagcgcatgtattgcgtctttatgaggcaatacataaatatcaagcgtatgtagaagaaaaaagggttaatcaaataaagtcagcattagagacggaaactagatatgtgattcaaatctttgctcaatacgagtgtagtgagtatggaaatgatttttatgaactcattaaagatcttttacaagatatagaggtggagttaaagatttatataaaaaataataattttatttacatttaaaaggtaaatataaagctagatttttaataataaaggtgggtataagttatgagcaaaacgattctttttactgggggcggtacagccggacacgttatgattaatattgtattaattcctaaatttatagagaaaggctggagagtcgagtatattggatccaaaaatggaattgaaaaatcattagtgcaaaatgttaaatacaatagtgtttcaacgggcaagcttaggagatattgggattgggaaaattttaaagatccttttaaaattatacgaggttgtttacaaagttataaattaattaagaaaacaaagcctgacgttatcttttcagcaggaggatttgtttcagttcctgtagctataggagcatggttaaatcgtgtgcctataattatacgtgaaccagatagcacattaggacttgccaataaaatagcattaccttttgctacaaagctatgcacaacatttcctcagacaggagaaaatgtaagtaatgagaagaaggtttatgtaggaccaattgtaagggaagaaattgagaagggtaacgtattacgaggaagaagatattgtgaatttcagcaagataaaccagtattattaattatgggtgggagtcaaggtgctaagtggataaatgatatggtaagggaatgtttagatacaatactattaaactttaatattattcatatatgtggtaaagggaaggtagacccatctattggcatggaggggtatatgcaatttgaatatataggcgacgagttgccgcatatactaaatatggcaagtgttgtagtttccagagcgggttctactgctatttctgaattgttatttttgaagaaaccgatgttgcttatcccgttaactaacagttccagcaggggagatcaagttttaaatgctgaatatttttcacggcaaggatatgcggaagttatactccaagacagagtaagtacgaatacatttatacatgcagcaaataagttgtatacaaataaggagaaatatattcaaaacatgaatggatataagaaaacaaatgatgagggaattcatcaaataatagatataataaatgaagtggtggagtaatagaaatgtaaatagaaaaacaaaaggaaagaaggtattttctttcctttttactatatttgttcaaattcattattatttattctaattagttatgtactatcggtgaatgccgttttctaatagctcagtaaatgcatgaatatgaataggtttactgtaataataaccttgaataaactgacatttatttttttgaaggaaatttacgtgctctttcgtttctacaccttcagcaatgacagacattcctaatgtatttgctaatgtgatgatcgttttaataatttccattccatcatcacatgtttcagacattgtaataaattctctcgggatttttaacgtatcaattggatacaaaggtaagtaggctagcgaagaataacctgtaccaaaatcgtcgatagaaatgtgaatccctaaactttttagtgtacgcagttttatcaatgtttctcgctcatccatcattgcaattcgctctgttaattcaagatcaagagagcttgctggtaaacctgtatttgttaaagtagaagaaatagactttacaaaatcctcttgttcaaattctttagcagataaatttacacctatttttaaatgtgaatatccgagtgcgtgccaacgtttcatttgcttgcaagcctgctctaatgtccattttcctattgaaataatttgtagtgtttcttctgcaatcggaataaactcgtatggagaaataatacctaattcaggatgattccacctaattaaagcttctgcaccgataattttattagattcactatcaacttgaggttgatacaaaaggaacaattcttcattttgtagtgcgtttggtaaatctttttctaatcgtaatcgtctttcaatttttttagcgattacatcgtcataaatagagacagagttaagctcttttgcttttgcatcatacattgcaacattagcgtttttcagaagtgtagcggtatcgattccggaatgtggataaatagcgatgccgatactcagtgataaagttaatttatgctcatgtatgataaatgactttttcatgcattcaaataattggttacataattggaataagtaatcttcgtcagtatagttttcaattatgattgtaaattcatcgccaccgattcttgaaagatgagtatgtgatggaagacatgattggaatcgctttgctacttcttctaatatgtaatctcctgatgaatgtccaagtgtatcgttaattgctttaaagcgatctaaatctaaatataataatgcaaactcgctttctgctattttagcattttttataactctctttaatttcttatggaaaaaggcacggttcccaattttcgttacagtgtcatggaatgctaaatattttatttcttcttgctgtttttttagtgcagtaatatctttcaccataatatagcttcctgaaatttgtccgtctattataataggaatgattgtaacgtataaaaaataagtaaagccatctttatattgagaactaagttgtaagaatgccgattcttgttgtttcactttttctaatgccaatgctagcttatgcttatcttcatctaaaatgatcgaaaaacaagtttcacctagtaactcatccgttggtgctccaagtagtacactcccagccttatttacatttaagaatattccatttaaatcaatggtgaagatagggtcaggatgatattcatataatgatttaaacttttgctgtttttgagaaagagcctctgatttatgaactaaatcagacgtccgtaaagtaactttttcttctagttgggcattaaatgcctgcaaacgttttgttaaggaattgttttgcatacgtacgatagaatgacgaatgagtacgaaaataaaagtaatacaatttcctgtaatgagagttgaagatgatgtttgttcttttaatgtaaacccgattagtattgcaacagcaagatagggaaatacaactaaagctttttttcctattatagggtttacaaggaaataatttttatgggtattatgatcttctgaaatagagccagctattgcaataagtaatataggtattctatataaaagacgtaataatattatagtttcagttgataagtggttatttaagtaaaaataaatatagttaaaagttgcagaacttattaatacaaaaataaagatataaattttccgtttggaattaaaaattgttggacggaaaaagagactaacacctagcagtagaaataataaatctgcaattgggtataaaaatgaaaggaaaacatctcctagtgaaagagcgaatatatttaaatttggttgattaaataaataccattctaatgtgaatatggaagtaagcactatgcatatatcacaaataaagaacgctttttcccatttattgcattcctttaagattttatagcagaaagcgataagacagaaaaatagaaaaaacatgtaaaatacatcagaaaccgtaaaacgatgtattggaatttcgaagaagctatcttgatatgtatatactatttttcctaataaaaaactaccaattgctattgtaatacatatccaaaacggatttgaactgactttcttagaatatatagagtaaatcagtgatacaaatgtaatggcttcaacgacaagtgaagcgaagcgtacatctgaatttgaaaaatgagtagggaatagatagaaaaacataaaatagattgaatagcatattaatgttccgattaatatacataattgtaaatttttatttaatttcaatgaaatcaccttctttaattatgcactatgttcgttatatctatacataataatattatttaagaattgtatcagatttccttataaaaatcatgtttataaggaaagtgttaaagagtgtgagtattcttaaggttaaaaaaatattgcggttgatagtatagactgtatcaagactttaaatagaaattgtatatttagtcatcctttgaattgtaaagtttttttagtgatttgtaagtggagatgcaaaattgcatataaaatgatgagtatctttttttgtgagatttttatttttaatctgaaaattaacatttgtgaaaatgttgagaaaggatgtaaaataagaacgtgtattcttacagagtggaatagtattgccactaaatagggaggcttttttatgatatatcgaattaaagatgcagaaatatactatgaaattgtgggagagggtaaaccggtcattatcatacatggctgcgcccctgaccataggttaatgatgaaatgtatggaatcagtatttcagaaatatgaaggttataagcgaatatatattgatttacctggaatgggaaaatcgaatgctccaaattggataaatagttcagatcgtatagtagaagtgcttatcacatttattgaggaaatcatttctactgaaaaatttttattggtaggagaatcatatggaggctatttagccaaaggtatacttgcaaagatgtttgagagagttagcggattactattagtatgtcctgttgttgtagcggagccagaaaaaaggattcttccagataaacaggtaattgtacaagatgaggaatttttaaatacgctcacttccacagaaagagaggcattttgtgagttagctgtaatagcaaatgaatatacatataagcgatttaaagaagaaattaagcctgggttagatgttgctaatgatgaatttattgaaaggttgcaaaagaattactctcttactatggattttcagcgtaaaaaatatgaaaatcccgttcttttactgactggaagacaagatatatcagtaggttatcaaaatattatagaaattattgaagaatatccaagggcaacattagcagtgttagatatggcaggacataatttgcaaattgagcagcctgaattatttgagagtttagtaggagaatggattagacgaacaaatcagcacagtttataaagtattgtagtattacgcctaagtgttgaaatgggataaatgaacgtgatttattaacttatctcgctattttcctgtaaaagcccgattagtaagggctaattaaagtttcactttataaaaaattttaaggagaaattatgagcacatatatttatatggttagacatggtgaatcaccaaaactagaaggaaatgaaagaatgcgcgggttaactgagaggggacatatggatgcccgtagagtaactgacatattaaaagcggagaggattgatacttttatttcaagtccttataatcgggctgtgctaacgatagaggagtcagctaatttccatgaaaaagaaatagtagtatatgaaaatcttaaagagtgtatgttttcaagtgaggatcaggttatatcagacaaagaggtgtatccacttgtacagaagatgttctctaatccggactttgcacgaacggaaggagagtcatatgcagattgccagagaagagtagtgaaagtattaaaagaaatcttaatggattttcaaggatggaaaattgtaattggtacacatgggcttgtcatgacattaatgatgaactattttgataaacaatatggttttgaatttttaatgaatacgtcaaaaccggatatatataagatggagtttaaagaagaacaattaatgaatgtagagagattatggaaagaggaataaaattagttgcatggattttgttgtaaaagttacttttatagcaaagtcttttttttgaatagaaagcatctttatcaactatttttagaatgttaaataaataagtaattattcagtctttgaataaattatggagaaattggtttagggaaacaattttaaatgtgtcaaaactccaaacgttggatttatattcaataggagaaaaagatgtagaattttgtcttacagtccccgtttacttttcatttcattacatataggctttgtggtgtaagggggacattgcctttacacaaaatctataaggaggtcattgtaatgaaacagattaaaaagtttgcgggagttgctttagcggggacgattggattaagtggactactgtttttagaaccaagtgtaagcgttgcggaagcacagcaagtgagagtggaaaatttcaatacaattgatgtaacgatgaatctaaatgaattgtatgtattaagtggcagaagtattgatattctttctggagataaagaagcaattcagttaaataaatacacaattagttttaataaacctgggaagtatgtgattaaagtaaatggctgtatttatgatgatgtatatacttttattgtaaatgagtagtatatattcttaaattgcgagataaaaacagaaacaccctatttacggtgagagtcgtaaatagggtggatttatttgtattaatctgcactttaaatatgttcactaattttctttttgttatgtaaagtatgtaaaagtgttaacaatgtaaatgaaatatacatcttcacattcaaaaaagttaaaatatttcgttttaaggattataatggagggagaaacataaaagggagtgaatgaacttgaaacaagaacttattgaaagatttacgagatatgtaaaaattgatacgcaatcaaatgaagaaagccatacagtaccaacaacaccaggacaaattgagtttggtaagttattagtggaagagctaaaagaaattggtttaacagaagtaacgatggatgataatggttatgtaatggcaacacttccagctaatacggacaaggatgttcctgtaattggatttttagcccatttagatacagcaacagactttacagggaaaaacgtcaaaccacaaattcatgaaaattttgatggtaatgcaattacgttaaatgaagagctaaatgttgtgttaacaccagagcagttcccggaattaccatcatataaaggacataccattattacaactgatggtacaacacttctaggagcagatgataaagctggtcttacagaaattatggttgcaatgaaccatttaatacataatccgcaaattaagcacgggaaaataagagtagcatttacaccggatgaagaaattggtcgtgggccagcgcattttgatgtagaagcgtttggtgcatcattcgcttatacgatggatggaggtccattaggtggtttagagtatgaaagttttaatgctgcaggtgctaagttaacgtttaacggaacgaatacacatcctggaacagcgaaaaataaaatgcgcaatgctactaaactggctatggagtttaacgggtatttaccagtagaagaggcgccagaatatacagaaggctatgaaggattctatcatttactttctttaaatggtgatgttgagcaaagtaaagcgtattatattattcgagactttgatcgtgaaaattttgaggcgcgtaaaaataacgttaaaaatattgtgaagactatgcaagaaaagtatggcgaagatgcagtcgttttagaaatgaatgatcaatactataacatgcttgaaaaaattgaaccggtgagagaaattgttgatattgcatatgaagcaatgaaaagtttagacattgaaccaaatattcatccgattcgcggaggcacagatggatcacaattatcatatatgggattaccgacgccgaatattttcactggtggtgaaaactatcacggtaaatttgaatatgtttcggtagatactatggaaaaagccgttcaagttattgtggaaattgcaagacgttttgaggagcaagcttaaaaaagaaccaagtagtacgaatgtgctacttggtttttttaatatagtactcgccacaaataaaaagtcgcataagactcccaattagcccagtttgccgcgaaaccttttatttcatttttagtcggtttattttcggaacctgttataaatttaattgcattatgcagaccaacatcatcaattggaaaagctgaaggaaatcttaaacaacgcattaaaacatagttggcagtccatggtcctataccatggatagcggttaattgtttctcagcaacctttacatcttgtgtttgcagtaaatcctcttttgatagttttctctctgtaataagcttcgcaataccgattaaatattcacattttctagtcgtcatttttaattgttggagatcttctacatgtagatttgcaattgtttcaggtgatgggaatatccaatgctttctaccgtcccattctacataactgccaaattgctcaactaatcttctttttagcgtataagcatatgttaagttaatttgttgaccgataattccccaggaaagtgcctcaaataagtctggaatacctaaattacgaaggccataatattgttcaattggtccttgaaggagtaaatcatgtttagctaatgtataaaagggagctaaatcagtagttaaatcaaaccattcttttacatagttagctacagcttcacgtatcgatttttcagatgtatatgattcttctaaacaacgtatttgaatattgccatctgtattcacactaatttcaactaaaggatttacatcttgaacagggataactttataaattttgttatcttcaatatgaaacatacattcattgttagaacgtgatagataacgtaaattttcttggaaacaaaattcttttggaactgctatagataatgcgctattatattctgctgtcatatgaattccacctgtaacttttctaatgtaagcaattttttcttcatttctaatccacccctaaatccggttagtttcccattcttcccaataacgcggtgacaaggaatagtaataaggagagggttagcagcaatagcagaagcaacggcgcgcacagctttaggtttttgaattctttcagcaatttctgtataagaatatgtctttccataaggaatttcacgtaccgtattccaaacagataattgaaaattagttccataagcatcgataggaaatgtaaaagtttctcgcttgttttctaaatactcgataacttcttgcgtatatatttgcaagtaatctggactatgaatcaatatatgttggggcagtttttttctagcccatatatttaattcttcaaagttttcgtcttgtgatccaatgaaacatagtccattttcagttgcagcaatatgaaatcgccaatttttatgtgtaagtagcgtccaatatatataattatttttgtaggaattcattatcgtatccctctttcatctcgttcttttttcgatattcagtaggagtaaagccggttttctttttaaataaagttgcgaaatactctgggttttctatcccgacagcagtactaatttctttaatagattgatttgtgtgtaaaaggtatttggttgctttaagaatcctgaattgttgtatatattctataggagttagccctattattcttttgaaagtacgttgtaaatgaaaagggctaccgtgacacattcccgcaagcatgtcgagagttaaggatttgtcataatgcttttcgatatagtctttaatttgttctacccactcttcattaggtaaagtgatcccatttggcttacaacgtttgcacgggcgaaagttttcacttaatgcttgctctgcatgatgaaaaattcgtacattgtttctatttggtattcttgatttgcatgatggcctgcaaaagattccagttgatttcacagcataaaagaatttgctatcataggaagaatcgttatgaataattgcttgccaatactcatttgttaatgtaactccttcattgtgcaaagaacatcacctctgaaattagtataacctgaataaagtgcgtatgtatgtattcataaatgtaagagcaagattacaaaggtgaaaatatcggatggcgtttagattattttgttgtttcggaaagaatgaaagaccagatgacagaagcgaaaattaatagtgaagtgatgggatcagaccattgtccagttgaattacatataaatttctaaaaaaagaagtatctccctaatattagggagatacttctttttttaattcagtttgttaaaatttttcaaatcattcttgaaataatttcatattaaatatatacttagtaacgataatcattatcagtgaaaatgattatcaagtgatgaagacgtaaaagaattatagtctaggggaagtgaacgtgaatgagttctggataaaattattaatctaatgaaatatatatatggaataagattcatatagttaaattctattgagaatatagtttgaaaatttgagaggagacatataaagatgaacaagaaattatttactttagggatggttaccgttttaagtgtaggtttagcggcatgtaatagtgcggataaaacttcaggcgagcaaaaacaacagacaaaagctacggaaacgaaaaaagatgaaaaacgaaaaattacatatttaggtaaagaatatacagtgccagcaaaagtagataaaattgcgacagctagtttagagtcaatggaagatgcggcagtacttggaattaaaccagttggtgccattactgtaggtggtaaactaccaaaatacctggaaaaagagttagaaggtgcgaaatctgttggtgagaaaatgcaacccaatttcgaaacattactacaattaaaaccagatgtgattacatcaagtacgaaattcccagcagaaacagctgaaaagtttacgaaagtagctcctacattcccggtatcacacgtttcaacaaattgggaagataacttaaagttaatgggagaattaactggtaaaaaagataaagcagaaaaaattattaaagactacaattcagacgctgaaaaagcaaaagcaaaactaggagataagttaaaagataaaaaagtacttgtcattagactaagagcaaacgaattattcctatatccagaaggagtatacttcaaccctgtaatttataaagatcttggactaactgctccagaacaattgaaaactgtaaaagcacaagagaaaatttcatttgaaaaacttgctgaacttaacccagattatattttcttacaatatgaggcaagtgaaaataaaaatccaaaagtgttagaagaaattgaaagtaatccaatttggcaaagtatgaatgctgcgaaggaaaagaaagtatttgtaaacgttgtagatccaatggcgcaaggtggtactgcttggagtaaaactgccttcttaaaagaagcagtgaaaaatttatctaaataatacaataagtaaggtgcgttgaatgatatgcagaaaacaaatgcagtaccagtaactatattatgtatagcacccatactcatcttatttacagttatactttcgattttgtatggggcgaaaagtattgatgctgaaacagtgtggaacgcattatttcattttgattcaagtgatgtaaatcataatattattattacttcacgtttaccaagggtagttgcagctcttttagtcggagcatttctagccatatcaggagcacttatgcaggggatgacaagaaactatcttgcatccccttctattatgggtgtgacggatggtgctgcctttgttattacactttgtataatttttcttccaggaatgtcatcaattggtatggttatatgttcaatgattggttctgcactcggagccggtatcgtgtttggttttggttcgctccttcaaaatggcttatcaccagttaggttagcgattataggaacagttattggaacatttttaagcagtgtatcggctgcaatggcttcgtatttccaaatttctcaaaatgttagtttttggtttaatgcaaagttagatcaagtagatcctaatataattaaaatcacgataccgtttgggataattggaataattttagcattgttaatatcaaaatctattaccattctttcattaggcgaagaggtttctattaatttaggacagcgtacaaaactagttaaagcgatggcaattttatcggtaatttttttaacaggaacagcagttgctttagtggggaaagttggttttgtaggtttaattattccacacattacccgctttataattggggtagattataagtggattttgccatgtgcaggtgttattggtggcgttttcttagcgttatgtgacgttttgagtagatttgtaaactatccatttgaaacacctattggagtcgttacctccttaattggaattcctttcttcctttatttaatccgtactagaggaggagagagacatgcttaaaagttcaagtcaacgtttcggaatgacgatggggattattatatttttaatactatgtgctatctatattagtttaacaaatggtacgttcgacattacgattacagatgtatttaaaacactttttagaattgatccagtaccagaacatgatttagttatttttgagtttcgtcttccgcgtatcgtaattgctggattagtaggattaggccttggtgttgcaggtgctgttattcaagggattacgagaaatggattggcggacccaggtattttaggagtaaatgccggagcgggaacagcgattgtcatttttatgtttttctttcaaggacaattaaaaagcacagactgggtttctattatgatgatgccaatgtttggtttagtaggtggattaggtgcagctatcatcatttatctgttttcttggaaaaacggtaaattagattcgcagcgacttttattaacagggattgcaattggatcgggatttggagctttttctatgtacttatcactcaaaatgaagtcaactgatttcgagatggctgcagtgtgggtgtctggaagcatatatagtgcgaactggaagtatattgtggctatgttaccatggcttattatcttaattccacttatacaaaagaaagcttatttattagatttattccaattggaagaaacgagtattacaagtttaggtgtttcagtagaaagagagaaatcgattttattattaagcagtatcgggcttgtgagtgcatgtgttgctgtttcagggagtatcggttttattggcttaatggcaccgcatatagcgaaaagacttgtcggtattcaacataagtatataattcctacgtgcggcgtaatcggaatgtttcttgtaattgcctcagactttattgcaaaaacagttttcacacctgtagagttaccagttggaatcgttatttctattgtcggtgtaccgtatttcttatatttactttataaggcgaaagcgtaagaggaggaataaaagtgagtattttaagtgcaaaaaatttagaaacaagttatgaaaagcttacagtgtttcgcgatttaaatgtggaaatacaagaaggaaaagtaacgacaattataggtccaaacggttgcggtaaatcgacattgttaaaaacaatgggaagaattttaaaacaaaaaagcggaaaagtatatttgcaagggcaagatttacatacaatttcaacgaaagaaattgcgaagcagttagctttactcccgcaaactccaattgcaccaggtgaacttaaagtggaagaattaatttcttatggacgctatccacatcgaaataacgtaaataagttaacgacaaaagataaagaaatgattgattgggcattaaatataacgaaaacttctgaatttcgaacgagacaaattgcaaatttatcaggtggtcaaagacaaaaggtatggctagcgatggcattagcacaagagacagaagtgttgctattagatgagccaactacataccttgatatgtctcatcaattagatgtattacaaattgtggagaagttaaataaagaacataattgtacggttgttatggtattacatgatatcaaccatgcagcaagattttcagatgaaattattgcaatgaaggaaggagaaattgttacaactggtagcccagaagaaatcattacaaatgaagtattaaaagaagtatttcatattgatgcacgtgtcatgattgatccgtataacggggctcctgtttgtttcggttatgatagcgttgtatctcaagaagaaaaaatcgaaatatatgtaacaagttaaaaagggggggatagggtgaatactacagttgaaaaacagcagattataatatctaatacagaacagtggaaaatgtattcaaaattagaaggtaaggaatatcaaattcatatttcaaagccgaggcaaccagcaccggattcaggatatcctgtcatttacgtattagatggcaatgccttttttcaaacatttcatgaagcagttaaaatacaatcagtaagagcggaaaaaactggtgtttcaccagctgttatagtaggagtgggttatccaattgaaggcgcattttcaggggaagaaagatgttatgattttacgcctagcgtaatttcaaaagatgcccctttaaaaccagacggtaaaccgtggcctaaaacaggaggagcacataatttctttacttttattgaagaagaactgaaaccacaaattgaaaagaattttgagattgataaaggtaagcaaacgttatttgggcattctttaggtggattatttgctctccatatactatttacaaacttaaatgcttttcaaaattattttattagtagtccatctatatggtggaataataaatccgtacttgaaaaagaagagaaccttataaatgaattaaacaatgctaagtttgaaacaggagtgttccttacagttgggtcactagaacgagagcatatggttgtaggtgcaaatgaattatcagagcgccttctccaagtaaaccacgataaacttaaatttaagttttatgaagctgaaggggagaatcatgcatctgttgtgccgacgtctttaagtaaagggttgagatttattagttacatataggaaaaaaggttatggatgaaacattccataaccttttttgatatgtagaattgtcctttttgaaagttttgtttcaacttttcgtctaaagagacaaaaagttgtcacaaaacggtcacaattagcataaacataaaatagacgaaatgaacttatttccaaaaaggctcggtttattccgatcatgatttgtagagctgaaaaagtatggattaaaagttcactatattcccaaggaggtagatcgtatgaaaactattcttgctatcgctggacttatttgggttctatcgcatggcatcccaatttatgaaggagaacaaattcgcagtgctctgaataaaaattttaatgaatatcatatcattgaccggcaagataatgttgtaacagttcgagtaaatgactgttttcatacggtaaccgttgaaggaacttcagtagtgaatgatacaaaagtatgtgatcaacaataattatatatggaaagaaaaaattcttggattaaatatctgaaaattaagattttaatattatagatgaagaataagcgggggcgggtaatccccgcttattcttgtttcactttattgaattttgatgagagatataatgatttttttgacaaaaaggaaagggtatactaaaaattgagattaagaagctaatgcattgttaagaataatcataaagcgtaaatatactcttatggggtatcgtgcgtagatatttaatgctataattggtatactcataaaaacaattgttttattgggtgaagagaaactttaagaaggtgataatatggatcataaagagcatgaagcagtaacacatagatcagaaaaagaaaaagaacagattataaatagattaaagagaattgaaggacaggtccgcggtattcaaaatatgattgaaaatgatcgttattgcgtggatattttagtgcaaatttcagcgattaatgcagcgatgaaaaaagtaggaatgggtgtattaaaaaaccatacaagtcattgtgtttcaggtgctattaaagatggcaatggtgacgaagcaattgaagaattaatgactgtatttgaacgtttttcaaaagcgtaaaaacaagctagtatgtcactggcttgttttttttgtttaccttcataataagatctcggcgtattgatgtgaaaaagtgtgtgtaaaataaacttttagaaaataattgaaaaatcatgatataaaaccattgattaccttaggggggtatggtaagatgtaattgtgattaacaaacaatgaataaacaagaggaggattttaaatggaacagttaacattacaggttgaaggtatgtcttgtggacattgtgtaaatgctatcgaaagcagtgtgaaagagctaaacggtgttgaacaagtgaaggttcaattagcagaaggaactgttgaagttactatcgactcgtctgccgtaacattaaaagatatcgttgctgtaatcgaagaccaaggatacgatgttcaataattatttttagatatggaaataaatcgtactttaaatgaagtacgatttattttgctaataattatacctcataagggtatatagaggtgagagacatgaatgaaaaaaaagaggccaatcttcaaatatcaggaatgacatgtgtggcatgtgcaaatagaattgaaaaaggtctaaaaaaagtagaaggtgttcatgaggcgaatgtaaattttgcacttgaaaaaacaaaaataatgtacgatccaactaaaacaaatccgcaacagtttaaagaaaaagttgaatcgttaggatatggaattgtaagtgataaagctgaatttactgtttcaggaatgacatgtgcagcatgtgcaaatagagttgaaaagcgcttaaataagttagatggtgtgaacaaagcgacagtaaattttgctttagaatcagctacagtagactttaatcctgatgaagttaatgtaaatgaaatgaagagtgcgattacgaagctaggatataaattagaagtgaaaccagataatcaagatgcatcaactgatcatcgattacaagaaattgaaagacaaaagaagaagtttattatttcgtttattttatctttcccattattgtgggcaatggttagtcatttctcatttacgtcgtttatttatttaccggatatgttaatgagcccttgggtgcaactagcacttgcaacccctgttcaatttatcattggtggacagttttatgttggagcttataaagcgttacgtaataaaagtgcgaatatggatgttctcgtggcacttggaacgtcggccgcgtatttctatagtgtatatttaagtattcaatctattggttcttcgaaacatatgacagatttatattttgaaacgagtgcggtacttattacattaattattttaggtaaattatttgaagcgaaagcaaaagggcgctcatcagaagcaattaaaaaattgatgggtttacaagcgaagacagctacagttgtgcgagatggaacagaaataaaaattttgattgaagaagtagtagctggtgatatcgtctatgtaaagcctggtgaaaaaataccagtagatggtgagattgtagaaggaaagtcagcaattgatgaatcgatgttaacgggtgaaagtattcctgttgataagtcaattggggatgtagtaataggttcgacaataaataaaaatggatttttaaaagtgaaagcaactaaagtaggaagagatactgcattagctcaaattattaaagtagtagaagaggcacaaggttcaaaagctcctattcaaagggtagcagatcaaatttcaggtattttcgtaccggttgtagttgtgattgcgattatcacatttgcagtatggatgatatttgttacacctggtgattttggcggagcacttgagaaaatgatagcagtacttgttatcgcttgtccatgtgcattaggtcttgcaacgcctacatctattatggcaggatcaggaagatcagcagagtatggtattttatttaaaggtggagagcatttagaagcaacgcaccgattagatacggttattttagataaaacgggtacagtgacaaatgggaagccggtgttaacagatgtaattgtagcagatggattcaatgaaaatgaactgcttagattagtaggggcagcagaaagaaattctgaacatccacttgcagaagcgattgtagaaggaattaaagaaaagaaaattgatatcccaagttcagaaacgtttgaagcgattccgggatttggtatcgaatcagttgtagaaggaaaacacttattaattggtacacgtcgattaatgaagaaattcaatattgatattgaagaagtttctaaatcaatggaagcgcaagaacgagaaggaaaaacagcaatgcttattgcaatcgataaagaatatgctggtatagttgccgttgcagatactgtaaaagatacttcaaaagcagctatcgcaagactgaaaaaaatgggtctagacgttgtgatgattacaggagataatacacaaactgctcaggcaattgcaaagcaagttggtattgatcacgtaattgcagaagtattgccagaaggaaaagcagaagaagtgaaaaaactgcaagcaaatggtaagaaagtagcgatggttggagacgggataaatgatgctcctgctcttgctacagcgaacattggtatggcaattggaacgggaacggatgtagcgatggaagcagcggatataacgttaatccgcggtgacttaaatagtattgctgatgcgatctttatgagtaaaatgacgataagaaatattaaacaaaatttattctgggcattagcttataacgcgttaggaattccaattgcggcattaggtttcttagccccttgggttgctggagcagcgatggcatttagttctgtatccgttgtattaaatgcattacgattacaaagagttaaattaaaatcttaaagagctacattaagtaattgaatagaattaaaaaacaatactttgaataagtattgttttttttgttcgtatagaaattaaaacgatataataaagtagaaatatagaatcgtatgtagtagaaaagttaagaggtagtttcgtaaggagacttatatatgttaaaagatattataattagaacattccagaaagaagatttagatcaagtattacaattgttctatgaaacagttcatacggttaatgcaaaagattataatgagttacagctacaggcgtgggcaccggagcaactagatagagaaaattggttacagtctttagaaaagaatattagctatgtagcggatcataaaggtgtgattgtggggtttggggattataacgatgatcgttacgtagatcgtttatttacgcataaagattatcaagggaaaagagtcgcttcatacatactacagaagttagaaaaagaagcagtgaacctagggcatagggagatatatacagaggcgagcattaccgcaaaacctttttttgaaagtaaaggttttatttgcataaaagaacaaaagaaacaacataatggtcagatttttattaattatgttatgaaaaaaatatccttctcataaatgagaaggatatttttcattattttacagcttcttttagttctttaccagctttgaaagcaggtactttagaagctgcgatttgcatttcttcaccagtttgtgggttacggcctgtacgagcagctctttcacgaacttcgaatgtaccgaatccgataagttgtactttttcaccagcagctaaagtgttagtgattgattctactacagtttgtacaactacagtagcttctttttgagaaatctcagcattttgtgctacgtttttaattaattctgttttgttcatgtttttcacctcatatgtaaataatgctatttaagttgttattataacgtataaaacattcgagaacaagtgtacgtacatatattcgcaaaaaaaatgaaatttgtaatattttttagggcactttatagacattccatttaagcggacagagatttgttcttcatttcagtcttctcttgatgagcaggtagtttcttattataagatatgaagtaaggtagtgctacaaataacatacctcctactaaatttccaaagaaaacaaaaataaagtttggaaaatattcagcccaagtgaaatgaccggcaaaaatggcggctgggatgacaaacatattggctacaacgtgttgaaatccaatcgcaacaaaagtcataaccgggaaccaaataccgataatctttccgataaattctttacttcccatactgagccaaacagctaaacaaacgagccaattacatccgattgcagaaataaatgcttgcaatggtgtatcttgtagtttcgcttgagcgatagaaatagtttttgctaaaaaagctccttcagttaagccaacgatatgaccgaaaaagtaggctacaaatacagcccctatgaaattgctaaatgtaacaataactaaatttcgtatgaaataaaataaagtaattttcttttgaagccaggccatagaaactgtcatcatgttaccagttactagttcaccgcctgcaagaataacgagaataaggccaatagggaatacagcagcgcctagaaaactagtaaatgatccccaagcctttggcattgttccaataacatgaatatcgagtaaataccctaatgctataaaagcaccgccaaaaaaaccgagaattaacatagggagtaatgataaatgagctttttttcttccggaattagcagcaagttccgtaatttcttctggtgtaaatacagacatgaataacccctccgtaataaaatgatggaatgaatagaaaaaatttcgaaaatctatgtattataaaaatatgttatgacttctgtataaaattgtcaaagtgaatagagagggaattacatattgataacattgttcatgttgtcacatgaatgtaacaataaggatttaaagtgtttctagaggtgaaaacatgaatacgaatcatgtaaaaaaagaacgaaaaaaatcaatcgtaaagatatttattattagttttataagtatattaatgataccagtaagtttgtattattatgcgacagaaatagaacgaaaactagtaacagttacgtggaatgaaatagaagcttctacaattcctaaagagtttaataataaaaaaatattgcagttttcagatgtacatttaggaccagagtttacactgaaacaacttgaacatttagtggagaagatgaatgaattacatccagatatagtagtttttaccggagatttaatagataaatttgggtcttatagtgcggaaagagaagaagcgaaggttattttgcagaaaatttacgctcccttagggaaatatgctgtgtttgggaatcatgataggggcgggggcggtagtttattttacaaaaaatatatggaagaagctggtttttctgtattagtaaatgaagtgcagaaaattaaagtggaaaacggcaaatatattataatatcaggtttggatgattttctattagggaagccgcaaatagattcaactttaaaaaacttgaaacaaaatgatttcaacatgttattagtacatgagccggatgttgtaaccaaaataaatcgttacccagttgatcttcaactgtcaggacatagtcacggaggacaagtccaaattccttttgtaggtccgttaattactaccaaactagctgagcactacgttgaaggtatgtatgaagtagaggggaagagtaagccgttatatttatatgtaaatcgtggcattgggactactaggatgcctgttagattttgtagtgtacctgagctttcaatttttgtgttgaagcaaaatagtaactagaatatttaacaatatgattccaaggaacgtgcgatgttggtcgatggaaaagagtttcttaaaactttagatgtgacaaagtaattttcataagtaaaaaacaacaataggacctataaagggacctattgttgtttttatcctgcattgattgcccataaatgtccgattgatgagggctaattatagttttactttgttatttttgcaaggaaagaccatcaaaatatgttctatagttactagagaattcaaagttgttttttgcatcccaattaatagaccaagacattaggccgcggaatgcaggatagccactctggttagaaagtttatactttcctccgaatggaactcctttaatgatataatttaaagcttttttcatttcagttggcgaaatgtatccaccacttggagctgccgctggtgctgctggaagcccaatcatgacttgatctgaacgaagagctgggaaaatgttatttgcattaccacctacaggaaaaccatgtaagagcatatctgccatagcgacctcgtagtctgcagtaccttgattgtagttattaccgtccattccaatcccgctaccagcgttgtagtgttgaacgtgaatgtatgttagtttatctttcactccataaataattggtaaatatgcaccccatatgcttccatatgcgctatatccgccttgaacataagctgtttcaggggccatgcttaatagaaaatctggaccataatgatctgagattgttcgaatagctgaaataagatttacgatttgaggggtagttgggtttttgaagttagtgtcatttccgtttaagtaaatacctgattcaaggtcaatatctattccgtcaaaaccgtatttatcgatcagagattgtatggaattaataaaacgatccttagcggcattgtcaggaagtaaaacgaccccattttgtccacctattgaaagaactattttctttcctttactttttaaataagaaatatctgatttgaattctgcatctgtaccatacacaggagaaaattcaacagtggaacgatcaccaccagtttcaccaaaagatacattgattacatcccattttggtgaaacgtcttttaatttaataatgccagtaccgttatcaaaattatgccagtatccaacgagtaattttgaacctaaattgtttgctgcttgtgcttggaaaggggataacggtagaagtaagaacattactaaaatacaacaaaaaaatttgaacttgtttaacatatcaacactcctatacaaaaagttgtctagatgtataatcttgtttatttaataatatctgaaaattctttcttttgtaaagggactataattttctcaacaattgtgtatgggaaagtattaaacctaatgtaataatttttgaaggaggttgaattttaattgttgaattcagaatattttgatatattttaaagtataggacaaaatctttcgcacagtactcttacataaatttcaaaatttagtttggaaggggatgtacaagatttggataaaaatctaaagaaagacctcaaaatacgccacattacaatgatttcaattggcggtgtaataggggctggtttgtttgttggaagtggtgcagttgtacattcggcaggaccaggttctatcgtttcatatgcattagcaggacttctagtcattttcgtcatgagaatgctaggagaaatggcagctgttaatccgacaagtggttcatttgcaacgtatgcaagagaagcgattggtccttgggcgggttatacaataggctggttatactggtttttttgggtaattgttattgcaatagaagccacagcaggtgctggtattatccaatattggattccacaaataccgctttggttattaagtttaatattaacaattttattaacgctgacgaacgttttttcggtgaaatcatttggagagtttgaatattggttttcttttattaaagtaataagtattgttttgttcctttgtctaggtcttgctgttattttaggatttgttccaggaacagaagcacccggcacttcgaatttaattggacaaggtggatttatgccaaacggtataagttcggtactgcttggaattactgtcgttatattttcatttatgggatcagaaattgtagcggtagccgcaggtgaatctgcagaacctgtaaaagcagtaaaaacagcaacaaacagtgtgatttggcgtattcttgtattttttattgggtctatagcggtagttgttacgctactgccatggaattcagcaaacatattaaaaagtccatttgtagctgtattggaacatataggaataccagctgcggcacaaattatgaattttatcgttttaacagctgtactctcttgtttaaattcgggtttatatacaaactcaagaatgcttttttcgatggcagaaagaggagatgctccaaaggcgtttttgaaattgaacagtagtggtgttccagttcgggccgttttatttggaactttcttcgcttatattggcgttgtgtttagttacatttctccagataaagtctttttgtttttagtgaatgcatctggcgggattgcgttactagtttatctcgttattgcagtttcgcatttaaagatgcgtaaaaaaatggggaaagtggaacaacaaaatttgaaagtgaaaatgtggctttttccgtatgtaacgtatgttacaattgttgctattatagcagttttagttgcgatgttcgcaattgatactttacgttcacaagcacttttaacaatgtttgttactgttcttatcatactttcttattttatttttaatagaaataaaaatagcacagttttgaatcctaaaagtaagaatgaggaatctgttcgattctaattttcgaagagagttacacccagtcattgctataaaagaatcatatataatcatagaaacaagtaattactattgtcatagtggatataaacttttttcttgactttttatacgaaggcgagcaaaatggtaaaaaaggaaggggggggatgataatggaagagtacgtattagagctgtataacctgttatatacgacagaatggcaagatattgtttcgtttctaggaatcgtattttgcatgaaaattgtaattgtatatatggaagagcaaggtatgttctattccttctcatccccgttcgatatgcagcgcgagccgttgctaaactatgccaatgtgaattacgaacaaattccttttgttattttctttatgattcgatttattacagcaattgtaaggaaaaaggaaagtgacgatgaagagtgccactcaacttgtaatatagcgaatgttttttaagctaaatacaaggaggagatttatatgtggtttcgatttcttatgattggtttcttttcattaacagcaatttctttaatgggatatcaagtgtctgaaatttttcaagcatatagcgatacattttttaacaaaaactaatcgcgttgctatttgaataataaagcgataaaatccttcttaagaagttttattaagaaggattttttctttgtcttatcttgctgtgtcaaactattgtcacatttacactgtgaatagtatgttaaaatagtgaggttacgtatacatatttgaaggaagagggagtgaccattttggtggatcaatcaacaaatcagaaaagctatgctcctattgtgataacgctttctgtaattgtaaatgcgattattttatttttgttctttggacctgttggctatgaaggagaattacattttgatgtaacaattttaccaatgttaaatgcaatttttaatagctttacgttcgtattcttattagcagctctatactctattattaagaagaatgtgaaaatgcaccgtggtttcatcctggcagcatttacaacgacgttgctattttgtgtttcttatttatcttatcattacttagcgccagcaacacattttggcggagaaggattcattaaatatgtgtatttcatcattttaattacacatattatcctggcggcaattattgtaccgcttgcattgtttgcacttgtatttggttttacaaatcaattaacacgtcatcgtaaaattgtacgttggacgatgccgatttggttatatgtaagtttatctggtgttattgtttacttaatgatctcaccttattaccaataaaaaatctcagcctgtaggctgggatttttttattaagcaaatatttttgtgaaatgaaaaaaatatggtatacaaaagtatagttgcttttcatatagaagggatggtaaaggaatatgcaaaattttgtatttcgtaatccaacgaaacttattttcggtaaaggtcaattagagcagttaaaaactgaaattccacagttcggtaaaaaagttcttctcgtatacgggggaggcagcattaaaagaaacggtatttatgataatgtaatttctattttaaaggatataaatgcagaagtatttgaattgacaggtgttgaaccgaatccacgtgtatcaactgtaaagaaagggattcaaatttgtaaagaaaatggtgttgaatttattttagcagttggtggaggaagtgtgatcgactgtacgaaggcaattgcagctggtagtaagtacgatggagatgtatgggatattgtaacgaaaaaaacatttgctaatgaggcattaccatttggtactgtacttactcttgcagcaacaggatctgaaatgaatgcaggctcggtaattacaaactgggaaacgaatgaaaagtatggatggggtagcccggttactttcccgcagttttcaattttagatccagttcatactacttctgtaccgaaagatcaaacaatttacggtatggtagatattatgtcgcacgtattagaacaatatttccatcatggaacgaatacagaactacaagatcgttattgtgaagctgttttaaaaacagtaattgagacagcacctaagcttttaagtgatttagaaaattatgagcatagagaaactattttatattgtggtactatggcgttaaacggcattttagcgatgggagtaaaaggagattgggcgactcataatattgagcatgcagtttctgctgttcatgatataccacacgggggtggccttgcgattttattcccgaactggatgaaacatgttgtagaggaaaatgtaagtcgttttaaacagttcgctattcgtgtatttgatatagaaacagatggcaaaacagataaagaagtggctttagaaggaattaaggcgctgcgtcaattttggacttcaattgaagcgccagcaacattagctgattacggtattggagaaaatgaaattgatataatggctaataaagcgatggcgtatggtgaatttggtaactttaaaaaattaaataaagatgatgttttaagtatatataaagcttctttataagtgaatttagaaaagaaacctatttgattgtttaatcgaataggtttctttttactgtttataaatgtttatgggtgttttttgattatttttgattgtttgtggttgatttttgtgaccgttttcattatactgtaatcaaagaagaggtgaataaaatgttaactcctgaacgtcatcaaatgatattgcaacttgtaaaagaacagaaagttgtaaaattacagcaattagttgaaagaacagaaagctctgagtcgacaattcgccgtgatttagcacaattggaaaagcaaaggttattaaaaagagttcatggtggtgccgctgttttaacaggaaaagggcaagaaccaacgatggttgaaaaatcatccaaaaacattcaaataaaacaacaaattgctaattatgcggctagcgttattgaacaaggtgattgtatttatttagatgcaggaagtacaacatttgaaatgattccatttttaataaataaagatgtgactgtcgttacgaatggacttatgcatattgaagctttagttgaaaataatattcgtgcgtatttactaggtggaatgatgaagagtaggacgaaagctttaatcggtgctatggcacaggaaagtatgcagaagtatcgttttgataaatgttttttaggtgcaaatggtgtacatgaacagcttggctttacaacgccagatccagaagaagcgctcttaaaacaaatggcattaacattagcaaacgaaggatatttcttaattgatgaaagtaagttttcagaagttgcatttgcgaaaattgcaaatgttgaagaagcaaatattattacaaaccatttagaaattgatttagaaaaatataaaagacaaaccaatgtaattgaggctgataaacaatgatctatacagttactttaaacccatctattgattatgtagtacaagttaattcctttgatttaggcgcagtcaatcgagcagagaaagatatgaagtttcctggaggaaaagggattaatgtttctcgcgttctccatcgtttaggtgtggaaaatatagcacttggatttactggtggattcaccggtcaatttattaaaggtgtattacaggcggaaggcgtaatgacaaacttcatccaagtagacggagattcccgaattaatgtgaaaataaaaggacaagaagagacagaattaaatgggcaaggtcctaatgtgacaaatgagcaatttgaacaattaatgaaacaaatcgaaagtatgaagcagggagattgcgttgtgctagctggaagtgtacctgcatctatcccaactaccttttatgaatcaatcgcagcgctcggagctgaaaaaggtattcgagtagtagtcgatgcgagtggaagtgcactgcagcatgtaattaaaaataagccatttttaattaagccaaaccatcatgaacttggtgagttgtttggagtggagctttcaacagtagaggacgttttaccttatggaagaaaattaattgaacaaggtataaaacacgttatcgtatcgatggctgaagagggagctttattatttacggcagaaggtatatatgaagcgactgttccaaaaggtgttgtaattaattcagttggggccggagattctcttgttgcagggtttgtaggcaaatatgaacagacaaaagatattgaaaaggcatttcaatacggcgttgcaacagggagtgcaacagcattttcagctgatttatgtaagaaggaaaaagtagaagaattattgtcgcaagtaattgtagctaagcgatagggggaagcaacatatgaaaattacagaactattaaaaagagatacagtcattatggatttgacagcttcaaataaagaagctgtcatagatgaattagttgagaaattaaatggggcaaatcgtttaaatagtaaaatggaatttaaagaagctattttaaagcgggagtcccaaagtacgactggaataggggaaggtattgcaatacctcatgcgaagacaaaggctgttaaacaaccatcgatttgttttggtagaagtgtaagcggtatcaattatgagtcgcttgacggacagccagcacacttattctttatgattgctgcaagtgaaggagcgaataatactcatttagaaacgttgtctcgtttatcgacattattaatggatgaagggtttcgcaagcaactattagaagcaaaggatgaaagtgagcttcttcaactatttgatgaaaaagagaatgaaaaagaagaagagattgaagtcgccaaaccagaaggaaatgaaccgtacgtattggcagttacggcttgcccaactggaatcgctcacacgtatatggccgcagatagcttgaaagcaaaagcagcagagctaggaatcgcaattaaagttgaaacgaacggatcaacaggtataaaaaacggtttaacaaaagaagacattgaacgagcaacagctattattgttgcggcggataaacaagtagaaatgaatcgttttgctggtaaacatgtcattcaagtaccagtcgctgatgggattagaaaaacggaaacacttcttaatcgagctgtaaagcaagatgcaccaatctttaaaggtgtaaaagaagatggaaaggcagaaagtacggaaaaagaaaaaggattaggaatttataagcatttaatgaatggcgtaagtaatatgcttccgttcgttgttggcggcgggattttaatagcgctagcgttttcgtttggtggtataaaggcggaaggtcctttagctgaattgttcatgtcaattggtggaggaaaaacaggtgcgtttttattccttgtaccaattttagctggatttattgcaagttctattgctgatcgtcctggttttatgcctggtgttgtaggtggatttttagcggcgaatgcgaatgctggctttttaggtggattaattgctggtttcttagctggatatgttgttttagggttgaaaagattattttcaggactaccagtacaattagaaggaattaaacctgttttgttatatccagtctttggattattgattacaggagttgtaatgcaaaaagcagtgattccgcctgtagtagcattaaatgaaatgttgacagggtggttaaatggtttaaacggtacgaatgctatattactaggtcttattttaggtggtatgatggcaattgatatgggtggtccaattaataaagcggcgtttacgtttggtattgctgcaatagaagcacagaattttggagtgcactcagcagttatggctggtggtatggtaccgccacttgcgattgcatttgcaactacattctttaaatcaaagtttacagaagcggaacgtaaatctggtttaacaaattatattatgggagcatcgttcattacagaaggtgcgattccgtttgcagctgcagatccggttcgagtaatcgtaagttgtgttgttggttcaagtattgcaggtgcgttatctatgttattccaaattacattaccagcaccgcatggtggattatttgtaatagcgttagtaaataaaccgttactatatattttctctatattaattggaacgattgtctcggccattatgctaggtgtttggaaaaagaaagttcaataacaaataaaaagagagcagcttttagtagctgctctctttttattacaaaaaaataggttaacaattaaatattgatgttttttggtaaaagatgtaacgaattgtgaattttttgtaacaaaaaagtaacactgtaattttttctggaaaaaagttcttgtgctcgtatatgaaaaatatatgaaaaccactggagattgtatgagaaatacattttattaatatggaaatttatgttacaactcgttaatcgtatattacgaatgctttgtaattgtgtgatttctaaaaattctaaaaatctgttgctataatgaaaatacgaaaacaaagcaaatggaggctattcatgaaaaaattattaggtatagcaacagcagcagtttttggtcttgggatttttgcgggttctgctaaagcggaaacaattgtaacaacagacgtattaaatgttagagaaaacccaaatgtagagtcaaagcttgtaggtaaagtgttaagtgggaatacactagatgttataaatacagaaaatggatggacaaaaattaagttgaacggtaaggaagcgtttgtaagtgccgattttacaaagagcacatattatgtaacggcgggcgtattaaatgttcgtgctggagcgaatactgattctgaaattttaggtaaacttaataaaaatgatgtgattgaaacgacgaatcaagttcaaaatgaatggttacaattcgactacaatggaaaagttggatatgttcacgtgccatttttaacaggaacagcacctgtaatcgaaaagaaagaggttgtagctcaagaagaagcgccagctagaacaaatacgccggttaaaaataatacagtagttaagaataaagagtctgttaagagtaacgattctattaagaatgtagaatcaagtaaacctgtggtaaaagaaaaaccggctgcaaaaccagttgcaaaatctactgaaacaagtgcgcctactggtggtcgtgaaattacagtagaagcgacggcatatacagcagatccgagtgagaatggttcgtatggtggtcgtgtattaactgcaatggggcatgatttaacagcaaatccaaatatgaaagtaattgctgttgatccgaaagtaattccgcttggatcaaaagtatgggtagaaggatatggagaagcgattgctggagacactggtggtgcgattaaaggaaatcgtattgatgtattagtcggttcagatggtagtgctaatagctgggggcgtaaatctgtaaaagtgaaagttatacaataggttatcgatattaatataaaaagcggttgcttgaaattatgtaagcagccgctttttatggattattgaaatggataaatagttttacctgtaataattttatatgcactgcaaaattgcgtttgtatatattctgtatttttattttctggatgtaatgttgtttcatggagggtagaatgaaaagcccgtagtaaacaatttagggcgaagtataattcctcttgtgaacaattttgttcttttatagaagtagctaaaatgaggtcttttgtcaaagatgaaaaattgatggtggattgtttcatagttaactcatcctctcgaaactatttttatcatgtatatgcagaattggacaaactatgttcttttttctgtgtaatttcatgtaccgaaatgaaagaacttgcaatcatgccgttaaaattggtaagattgggtataatcaatagatggagtatattacataaagagagttgaataatatgggagaagtgcaacgtgaaaaagttgctgtcatcattggaccaactgctgttggaaagacgaagttaagtatcgatcttgccaaagcgttgaacggtgaaattattagtggtgattccatgcagatctatcgaacgatggatattggaactgcaaaggtaacaaaagcagagatggacggaattccacattatatgatcgatataaaaaatccggaagattcattttctgtcgcggaatttcaagaacgtgttcgcaagcatattcgagaaattacagaacgtggtaaattaccaattatagttggtgggaccggtctttatatacaatctgttttattcgattatcagtttacagatgatgctggtgatgtgatataccgagagcaaatggaaaagttagctttagaacgcggtgtggaatatgtacataaaaaattgcaagaagtagatccagaaagtgcggagcgtattcacgcaaataatgtacgacgtgtcattcgggcgttagaaattttccacacgtcgggtgaaaaaatgagtgaacaaattgagaaacaagaaaaagagttactctatgatgtttcattaattggcttgacaatggatcgagaaatgctatacgatcgcattaacttacgagtggatttgatgatggaacaaggcctattagaggaagtagaagggctgtataatagagggatacgagattgtcaatctattcaagcgattggatataaagaaatctatgattattttgagaatcgagtttctttagaagatgcggtatcacaattaaagacgaattcgcgtcgttatgcaaagcgtcaattaacgtggttccgtaataaaatggatgtcacgtggtttgatgttacaaacggtgaaaaaacgtcagaaattttacgatacatagaaggaaagttacaagtaaagtcgaataatagtaagtagagaaaaagaggaggattcgacatgaagcaatcaatcaatattcaagatcagtttttaaatcaactccgtaaagaaaatacgtttgttacgctgtacttattaaatggtttccagcttcgtggactaattaaaggatttgataattttacagtcctgctggaaacagaaggtaagcaacagcttatttataaacatgcaatttctacatttgtaccacaaaaaaatgtttcaattgaattagaatagtaatgaattattgtacataacaaaaaagagcgagtttcctcgctctttttttatttgtcataaacaatatatagtgaaatttaagcgattctaaatacagtaaggcggatgttagtatttcctgttgcagggatcgtaatctcattaagtgtagattggacagagattcttgcaccagctgctaatgtttctattgtagtaaatgaaagtgagtcgcctattaaatttgaagagaaattatcagttgcgactgctccattaattgaaattcctactccgagtggagcgcatcctggcgcagttgtagaaatggatacgctaattacataaataccaccgttaataacagtaactgtatctgtgccgttgaagataatattgtttacgttaattgcagtactaaaaataaaattattaaattgcagtactgtttgctgaatattgtttgttacaacaattgttgctatagggaagctaggtccagtaggcccagtaggtccggtaggtccaccagaaggtccagtaggtccagtaactcctatgccagtagcgccggtagcacccgttggtccttgaatgccttgaggcccggtagcgcctgtgttaccttgaacaccttgaggtccagtggcaccagtagcgcttttacaggtctctcatgaaagtaaaaaaattaagtttaaacatactatacgaggagtggaagaaatggaaaagaaaacaatgggaatccatcatattacagcgattgtagggcatccacaagaaaatgtagacttttatgctggtgtattggggttacgtttagtgaaacaaacagtgaattttgatgatccaggtacgtaccatctttattttggaaatgaaggaggaaagcctggaacaattattacgtttttcccatgggcaggtgctcgtcaaggtattattggagatggtcaagtaggaattacgtcttacgttgtaccaaaaggtgcaatggagttttgggaaaatagattagaaaaattcgatgtttcgtatacaaaaatgactcgttttggagagcagtatttagaatttgatgatccgcatggtttgcatatagaattagttgaaagagaaaaaggcgaattaaataattggagttttggagaagttacaccagaagtagcaattaaagggtttggaggtgctgttcttttatctacacagcctcaaaaaacagctgaattgttagaacatattatgggtcttgagaaaattggagaagagggtgaatttgttcgattccgttcttctgctgacattggaaatattattgatttgaaattatcaacaatcggtcgtggccaaatgggcgttggcacagttcatcatattgcctggagagcgagtgacgatgctgatcagctagactggaaagagcatgtgtcgcgttttggatatcacgtaactcctgtacaagatcgaaattattttaacgcgatttattttagagaacatggtgaaatcttatttgaaattgcaacagatcctcctggtttcgctcatgatgaatcgttagagacgatgggtgaggaattaaagttaccggaacaatatgaacaacatagaaaacagattgaacaaacgcttttaccatttgaagtgagaaatttagattaaagtgattgaagggggaaaaggattatgatgaaacatgtttttcaaaaaggaaaagatacgtcaaaaccagtgttgttattacttcatggcacaggtggtaatgaattagatttactaccacttgcagaaatagttgatccggaagcgtcggtattaagcgttaggggaaatgtgttagagaatgggatgccgcgtttcttccgccgattagcagagggcatttttgatgaagaggatttaattttccgtacgaaggaattaaatgaatttttagatgaagcggctaaagaatataaattcgatagaaataacattgtagctatcggttattcgaatggggcaaatatcgcagcaagcttattattccattacgaaaatgcattgaaaggtgctgtgcttcatcacccaatggtaccaagaagaggaatgcaattagcaaatttagcagggaaatctgtgtttattgctgctgggacaaatgacccaatttgttcatcagcagagtcagaggaattgaagatactattagaaaatgcaaacgcgaatgtaacaatgcattgggaaaatcgagggcatcaattaacgatgggtgaagtagaaaaagcaaaagagtggtatgacaaagtattttaaaaaagaagcatctgctaaccattagcagatgcttcttttttatttaggactggattgcaagatgagatgaagaaagtggtagctcaatatcaacaattgtacctttatttaattcgcttgaaatgtgtaatttaccatgatgttcttcaattattttgtaacacatcattaatcctagtcctgtgcctttttcttttaaactataaaaaggttcgcctagacgggagatacgatcttctggaatgccacaaccttcatcgataattcgtattaagatgaaattatcctctaatggttttgtttggatgaaaatatttccgccatttggcatcgcttctatcgcattttttaatatgtttataaaaacttgttttaattggttaccgtcacattgaatatcatatacgtaatcaaaatgatccatgatgatatgaacgctatgcataattgcagtcggtaaaataaatgtaactacctcttcaattaaagtttgtatgttacaagtttggatagataatacttgtggcttagacatcgccataaattgactcgtgatggattccatttgtgaaatctcacttaacataacatcgatataccatttttgctcctcatttatttcagggaggagcaatgttagaaaaccctttagggaagtgagtggatttcgaatttcatgggcaattccagctgtcagttgtccgactactgcgagcttctcagattttcgtagtaacttttcagtttcttttagctctgtaacatctctccccatcacgataagacctttgcgagaaccattaggatgataaagcggaacttttgatatacttaagattaaatcgaaatcatctctatgtataataaattcctcgccatgaagaatttgtctttgttgccatgctagttcatcgacttcttcacaatgtaaaaaagcttctcggtatgcttcattatattgaatgagttcgctatcttttttcccgtggtaaggtacatgatggaagttgaagcaagaaagtgcgtagtcatttgcctcaagccagcgcccttcatgatctttaaatataacaaacgcaggcatggagtttactaatgtacgtaatctcttcttactttcttttagcatattctcaattctttctgatttttcaagtggcttcataatagcgtatacaccagtaagacgattttgaacaaaaataggaactagttttgtcacaacatctaataagaatccatttttatgataaatagataagatatactcttgttgattatccgcttcagtattctttatattttgtaatacttgctcagaaatatgggctcctaaaatagaggtaatatttttctgttctaattctaaagaagtgtaacctaatattctttcggcagaaggatttatatgtagaataactccttctaagtttaatgaaataatactatcaggattatgttcgaacagagatgcgtacatttctgttaatgaacgatcttgtatatggtttcgcaaacgtctagaaatgttcggatgacgttttttttgagttggtgaatattttttacgactcataatagttcctccgtacaaatagcatctaaaaagatttgtctattcataactataatatagatgtgatgtgtatttctataaaaaatggaagttatagaataaattttatttttttattttttttgcaaagtgaatgcaggatggtaataaggggagcttatattgttttataacccttttgtaagttacagacggctgttttccgtataacattagggtagaggagggggagagaaaatgaaaaattatattcaagggattgatcacgtgcaagtagctgcacctgtagagtgtgaagaagaggcgcgtgatttttatgggaataaaattggtatggtagaaattccaaagccagaagagttgaaaaaacgaggtggatgttggtttaaatgtggaaatcaagaaatccatattggtgtcgagcggaactttacaccagctaaaaaggctcatccagctttttatgtgaatgaagttaatgaatttaagcaaacacttatagagaaaggtgtaaaagtgattgatgattatgcacggccagatgtaattcgattttacgtatcagacccgtttggaaacagaattgaatttatgcaaaataaagactaggtgtattcccacctagtctttaacttcttctgaaaagtcctaacacttctacagtttctgtaatattaacgaatgcattcgggtcaatttcagaaattgtaagtttcatacttgctaattcttcacgagaaacgaccgtcataagtacacgctttttctcgcttgaataagcgccttcgccatcaagtaacgttattccacgtacaacagttgaaagaagctgttttttcattttttctgcttcatttgttacaatcataagtgtaactttacgatgttttgtatgaacagcatcaattactttaccagttacataaattgaaagtaagcttgtaagtgcaacatcccaggtgaagaagaatcctgcgattattacaacgactgcatttaaaataataaggaatccgccaagtttaatgtctcgcttgcgggataaaagcataccgataatatcaaatccaccagtggatccattacagttaaaaacaagaccaataccagctccggcgatgacacccccgaagatagaagataacaatggatctgttgctacgacttttactggaacgtagtataatgcaacagataatacaactacagagacaactgtgttaaaaatcactttttttccaaggcctatgtaccctaaaataaggataggtaagtttaatacaaagttaataatgcctgtgtttacaggggttacaatccctaaaataatagcaattccgccaattccactacttaaaattttgtgggggataaggaaaagattaaaggcaaccgcaataataatagaaccgataataacaccaaggaatctgaccatttctttcccgtccttcactgaaaaattcatattatttcaagattatatatgatattgaaagttttgggtaaaaacagtttattttggtaaattagattaatcgaaagaatttgagtattttatcatttgaaaggggatacagttgtgaagataaaaacatatcaacagaaaagcccgttgaagcaagaatgtgaggattcttatttttgtaataaagataaaaagatttatggtgtatgtgacggtgcaacaccacttgtcccgtttcgtgatgaaaatggacataatggagcatacatcgcttcgcatttatttgcaaattattttactgcattacgagagaatcatagtttacaatttgcagttaccaaagcaaatgaagcattacaaagcaaaatgttagaatatgaagtagacacgagaaaaaaagagcatttgtggtgcacatgtatcgcggcagttcaaatagttggtgagaaaattgaatatgcgcagcttggggactgtatgattgtcgcaacttttcaaaatggaacgatgcaagtattaacgaaagacacagttgaaggaattagtaaacgagcaaaaaggaagagggaagaagatcgtaaaaaagggttatctgtaccagaagaatatgtttttcaagatgtgcgagaacagttaaaatacaatcgttatcttgcaaatatgccaaatggttattcagttgcaaatggaatgaaagaagcgatacattatttacaacatggtgaattacatatagatgaagtgagtggaatttttatttgttcagacgggttattccacccagattggtcattagaacaaactgttgcatatataagaaagaatagtataaacgaatatgtagcaatcattgaaaagctggaaggggaaaagagaataaaaccagatgataaaacgattattatgattgatttttaagaggaggcagttcaaatggaaattaaatatgtcaatctaacatttcaagatgaattagttcctttagaaaaagtaaatcaactgattatccaccatacagctgaagatggatgggacgtgtataaaacgcatgaatttcatcaaactgtaagagggtggagcgggattggttacaactattttatcgaaaaggacggaactgtagtggaagggcgaggtttacatattggagcgcacgcgaaagaccataaccgtcatacaattggaatatgtatgacgggaaatttcgataaatacgatccaactcctgcacaagtgaatgcattatattctttatgcaaaatgtttatgaagcaatttgctataaagaaagaaaatatactaggtcatagagagttagaaggagttacaaaaagctgtcctggtaatcgtttttctatggtagagttaaggaagatattatcttaaatatagaggagtaacaacgatgatgaatataaaaataccaaatgataaaaaagaagagcttgtagcgcaaattcagcaatttttcgttgaagaagatttagatgaaattggacgtttccaagcagagcgtttaatagaagaaatggttaaattagttggaccatttgcatacaatcaagcaattggagatgcaagaaagcttgtaagtgagaaattaacgaatatcgaagaagatttatacgtgttagagaagaatgaaggaaaataaaaaaagagcccatcggctctttttttatttgattgatagcaaaaaaacatagggaaaacacggaaaagacattgaaaatacaccttttatttttagaatattcttagttttaaaatacttcagaaaggaagattgtaatgagattaacgccaagagaaattgataaactgctagtagttgttgcggctgatttagcttatcgacgaaaggagagggggcttaagttaaactatccagaaagtatcgctattattacgtatgaaattttggaaggagcaagagatggtaaaaatgtagcggaattaatggaacttggaaaaaacattttaagtgctgaagatgttatggatggtattgcagacatgatatcagatattcaagttgaggcaacttttcctgatggaacaaaattagtaactattcatcagccaattcattaaaggaagtgaatgttatgattccagggcaatatatccttgcgaaagaagacatagtgtgtaatggaaataaaaaagcaatgaaagtcaaagtaataaatcagggagatagacccattcaaattggatctcattaccacttttatgaagtgaatgaggcattaaaattcaatcgcagtgtagcaattggacaacatttaaatattccagcaggtacagcggtaagatttgagcctggagatgaaaaaacgattgaactagttccatattcaggggaacaagaagtatatggatttaaaaataaagtggatggcgatattcaatcttacacaaaaagagggagatagcatgagttttaagatgtcacgtaaacaatatgctgatttatatggtccaactacaggagattctattcgtttagcggatacacaattattcgcacatgttgatcgaaatgccactgtatatggtgatgaagctgtctttggtggaggaaaatcaattagggatggtatgggacaaaattcacaacttacaagagaacagggggttgtggatgttgttattacgaatgcaattattattgattatacgggagtatataaagcggatattggtataaaagatgggaagatttcagcaattggtaagagtggtaatccttcagttatggataatattgatatcatcattggaacatcaacggaagtaatttctggtgagcggaaaatcgttacagctggaggtattgatacacatgtgcatttcatatccccacaacaaattgatacggcattggcttcaggtataacaactttaattggtgggggaacaggaccggcagaagggactaaggcaactacaataacacctggatcttggaatttaagaaaaatgctagaagcagcagaagcttttcctataaatcttggatttttagggaaaggaaatagttcaagtttacctgccctggaagaacaaatatttgcaggggctatcggattgaaaatccatgaagattggggagcaacttcgtcagcaattaatcactcgttacagattgctgataaatatgatattcaagtcgctattcatacggatacgttaaacgaatgtggttttgtggaagaaacgataaaagctattgataatcgtgttattcatacgtaccacactgaaggagctggaggtgggcatgcaccagatattataaagattgctgcgctgaataatattttaccatcatcaacgaacccgaccttgccatatacagtgaatacgctggatgaacatttagatatgctcatggtatgtcatcatttaaaagcgaatattccagaagatgtaatgtttgcagattcaaggattcgaaaagaaacaatcgcggcagaggatattttgcaagatttaggggttttcagcatgattagctctgactcacaggcgatgggaagggttggagaggttattattcgcaattggcaaaccgccgataaaatgaaaaagcagattggtagtttagagggagataaagaatataacgataataatagaattcaacgttatatagctaagtatacaattaatccagctattacacatgggatttcagaatacgtgggctctattgaaataggaaagtatgcagaccttgtaatatgggatccacaatttttcggtgttaagccagatatggttttgaaaagcggaatggtagtgatggcattaatgggagacgagaatgcttcaattcctaccccacaaccatattatgaaaaaaagatgtttggtgcatatggaaaagcagtacagtcaagttcgattacatttgtatcgaaagtagcttatgagaataatattaaagaaaaattgggtttaaataaagttgtattacctgttaaaaatacgagagagatttcgaagcaagatatgaagttaaataatgcaacaccagaaattgaagtagatccgcagacatatgaagttaaagttgatggacaagtaatcacgtgtgaagcagtagatgtactacctatggctcaaagatattttttattttgatataacgggggagataaaatgattattgaaaaaattaataacaacgtatgcaatatgaatgatttctcaaacacaaaaaagcatcttgataagatattaatttctagtgagcttttactgaagagagttcagaaattatattcagaatctggttttgaaattggggtgtctttagatagtggagaaacattaaagaacggtgatattttatatgaagatgaaaatcgaattgtgtatattgaagtattaccagaagaggtaattgtaattactccaaaatcaataaaagaaatggggattattgctcataacttagggaatagacatttaccagcacaattcgatgaagggtgcatgattttggcgaacgactacttagtagaagatttacttaaaaaggaaggtgttccttatcaaaaagaaaatagagtattaccaaaaccgttcaagcatgcttcgcacaaacatatttaacctacttaacctactccaaattagtgattcgaacttcccaacaggaagttttagtcactcttttggattagaaacatttattcaagagggacaagttacaaataaagacgggtttttcaaatgggttaatcgatatgtaaaagtccaattaacatacacggacggcttaatttgcaaatatacttacgaagccattaagaataatgagggagaacaaattacatttttagatgatttaataacagcacaaacattgccttttgaatgtagaaaagcaaatagaatgattagtaaaagtacttctaaattattgtgtgaattgttctcgtttgtaaatttaaatatatataaagaaaatattatgggtaataaattacaaggtcatccgagtattgtatacggaatattaggggcggaattgaaaatgacaatagaagaaacgctcttagttttcttatactcaagtgttggaagtataattcaaaacggtgtgagagccattcctcttggacaaacagatggtcaaaaactattacaagaatgccatgaattaatctgcgaatctattgatagaattcaaatactttcattagaagattttggattgaatgatcctgaattcgaaataaatcaaatgcaacatgaagatgtaaatgtaagggtcttcatgtcatagggaggaagaataaaatgataaagcctattaaaattggtatcggtggtccggtaggtgctgggaaaaccatgttagttgaaaagttaacaaaacatctaaatacagattatgaaattgcagcaattacaaacgatatttatacgaaagaagatgcaaagattttattgaaaacaggtgttttatcagaagatagaattattggtgtagagacaggggggtgcccgcatacagcaattcgagaggacgcttctatgaattttgaagcaattgaagaactcatgattagacataataatttagatattatttttattgaaagcgggggtgataatttagctgccacatttagtccggagctagtggatttttcaatttatattattgatgtggcacagggagaaaagattccgcgtaaaggtggacaaggaatgatcaaatctgatgtatttgtaattaataaaacggatttggcaccttatgtaggagctaatcttggagttatggagcaggatacgaaaaattaccgacataataaaccatacttttttacaaatttgaaggatgaggaaggtttacaagaattaataaattggatgagacagaacattatgttagaaggactgaaaaaatgaaatcccctacaggtgtcttaaacattgatatgatggaaaagagacataaaaccgtacctattaaggtttatcataaagatgccttaaaagtaacgcagccaatatatttggatgagtatggtagagcatattactatattatgaattctggtggaggctatttaaaaggagatttctattctataaatataaatgttggtaaagatgcgaaaacatatataacaagccaatcagcaacgaaagtttacaagactccaaatagttatgctttgcaagaattgaatttttatattggtgagaatgctgttatggagtatttaccagacccgttaattatgtacaaggatgcagcatataagcaaaaaacaaatatatatatgcaaaataattctacattgattttatgcgattcagttacgcctggttggtcgccaaatatggagaagttcacataccaatattttgattcgttaacaaaaatatatatggaaaataaacttgtagtatacgatcatttattgctaaaccctttcaaagagtcgttagatcaaatgggaatattaaatcaatattcccattatggtactttcatagttattaatgagaacattacaaatgatttaattgcaacattgaaaacatcactttctaacactaacaatatgaaaattggaatatcttctacaccatgtaaaggctttgtcattcgcatacttagtcataatactgaggatatggagtctatattttttcagtgtcatcgttttgttagagagaattgtctacatgaagaattaacatcctatcgaaaatattaagtaggagaaggggatactatgactaatgtgggattattgtttgtcggtgcagttctatttatgaattcactagcagcttttaaacttattgatagcaaaagtgtaggatactttaatttatttgtaggggcattacaaactttgacaccattatatttattatttacaggaagtcaatccgatgagtggactatcctatctaatggaactatttttttatttggttttacttatttatatgttggtcttacgaatatattaaaacttgattcttcaggtgtaggttactattctctttgggttgctatcattgcaacggttatgggaattgtgaatcaattacatgagagtggtagtttgcaaagtacaataatttggttcttttgggcattcctttggtttttatttttcctacaagatggattgaaaaagaagattcatatttatgtaggtattgtttgcttcattgaatcttggattactgcaacagtaccagctctgttaacacttacaaatcataccgacgtgttaaataattttgtaattattttagcgactattataacgattttagtttttattatggcacttttctttttcaagagtattcaatttaaagtagaaagggttagtaactatgtggaaaagtgaactgaaaaaggcaaccaacttttttgttattattatatttcttcatgtgcttggaattttattattattaccggcgctatataaaggtaatagcataatcggaatggctattattgcatattctttagggttgcgtcatgcgtttgatagtgatcatattgtcgcaattgataatactgttcggaaattaattgaaaaaggtaaaaactcacagggggtgggattttacttctcattaggacactctacggtagtatttgcgatgattgtattaattgctttaattggaaaaacggcaaaacatggaatggagagcttttcaactataggcggtattatcggtacaatcgtttctagtacattccttatcattattggtcttaccaatctgttgtaccttattaaagtgttgagaagccacgaggacaaacagccagaaaatttagggtttatatatcgtttcacacagcgcttatttacgtttattgatagtcagaagcaattgtatataatcggttttttatttggacttggttttgatacagcgagtgaaattggattaattgctctttctacagtaactgcaacaagtcaatctattccacttgtaagtatatttgctttccccgttttgtttgctgccggaatgtcattgatggatacattagatagtacattcatgaatacgaattataagtgggcaatggaaaatagtcgaataagaaattcatataatgtattaattacctcaatatctgttattacggcttttttaatagggggatatcaactattatctttgcttattgaaagctataatttacagggcccgttttggaatctcatacaagtagttaattttgattatctgggtatatgtcttgttgcattctttattatttctcttattgtttttgttgtatggaatagaaatgcctttaaagaaccgcttacaaagagcatagagaaataaaaatatatcatatgtcatttggttcattatgtatataaagtaaaataaaaaacacgttagatgaaaattcatccaacgtgttttttattatttatgttccttatattcatgtactttttctttcacattaccaactgtatctttagcagtgcctttcaccttatcccattttccttcagcttgtaatttcttattgtcagttactttcccaacagcttcttttacttcgccttttaccttatcaatggcaccttctactttttcttttaaaccgtgttcatgcttagtcatacatttctcctccttgtagtttgattagaattctcttttcatagtgcaagttgaatgatgtacctagtaatagcgtaacaaatctagttggaatattcaaatgattaataggatagaaaaggaattgtcataaaatgtttaaaaatgtaacggaaggagaaataaagtaaattataatatgtctcttgcggtccatattgattttgtataagcaattttcatgtgggcacgttccatgttattttgactgccgctaccgaaccttgcttgtccaactattaaagtacaattggattcaatagctgtcttaattcgtttttgaattaatgcagtatgacagcctttacgctgaaattctggcaaagtagcagaagcagctaatgatgcgacacccttatttatatacaggacaccaataccagcagggatattttgaacttcagctatgaaaaaatgccatcctggttcattgtaaagaatttcattattttggcgcacgctatcttttgtaaaggatggcatattaaatccacatacataaatgtctgcaaaaatatcaaactcattttcttttagttttcgtattgtaatattagaaggaagaagtgatgaaccctctctcggtatactatacaaagcggtatggaagctagattgataaaaccctttttgagataagtattgaaataattcagttgtaccttgtgctggggtaatttcaaaacgacaagggatttgtagtgattcataataagaaatgattgcatcaatcgcatctgcatttgtaataccttttaccgtattaaaagcaggaccagcaattatttttgatgaaaaggcagtggcgctaccgaatttttttatttgcacttgcatggggtttccgcttattgtttgtagtctctctaatctagaagagagcatatcaatttctgcattttcaatttctgttgctatatcgagtgtcataacagtagtcataaaattcctccgttaataaatatatttcatagtatatatacgatttttgttttgagattcctgttgtaatgtaggagaataagaagttttttggaagggaaatggaattgaactgtcgaagggagtagaaacagattaaaggtggtgctctcatgaaacagaaagacgtgcagacatgctctaattgtggttctcaaaatataggagaaggtgagtttgttggatatgcacaaatacggaaaaaggaaacgatgttcacatcttcaccggtggatgcttatatttgtacagattgtgggaatatccttttattaaaggtaaggaattatgaaaggtttaaacagaaacctttatgattattgagaagtggtcatatccaactttgtatacgaaacgacttatgttaaggaaaatgaatatgagtgatagtttacatatatatgagtatgctacagataaagagatgacaacttttactgtatgggatgctcattgatcgttatgtgacacatataactatatagaagaaattgtggggcaatataatggagggcaagtagcacctcttggaattgtattaaaagaggagaagaaacttataggcacgtgtggatttataaaatatgatttggtcacacatacagcagaaattgcatacgccttatctcgaaaatattggggaagaggattagctacggaggctgcattagcttttttctactatggttttcatgagttgcatcttaatagtattgaagcgggatgtgattcagaaaatgaagcatctgaaaaattaatgaaacgtttgaatatggagtacgagtgcacgattcaaaaggatatgttcattaaaggtaagtatcgtgacacgaaaagatattgtatatctcgagaaagatatatggataaatgaaatatttcatataaaaaactcctttaaatgaataaaggagtttttttatttttcataacaataattacctttaattgttataattggttgttaaggggtcttggtttattaacgccataatcatagaaggaaaatagctaaatcgtctataaaaccactaaataacacaatcgcaaccgtaagttgacaaagtgcaaccccgggaagatagagataagggcaatgtctacatacaatttaggtaagaaaacaaaggggggcacacatatgggatttggtgaaaagctttttaaattaagaaaggaaaagggcctttctcaagaagcattagctgaaaaattaaacacaacaaggcaagcggttagtaaatgggaaaacggtcaaggttttcctgaaactgaaaagttaataatgattggaaatgtttttgaagtatcactcgactatttattaaaagaaactgcagagcaaagtaatgaaaatgtggatggctattacgtaagtcaggaaatggcagaagggtatatagtgtacggacaaaagatttcaaaatatatagcgttaaggtttagtttgcttattttgtctacaataccgtatctattatttaaagaaaatgcaacaatgtcgacatttcttgtcattatcattgctgttcttggaattggagcaatgatggcacctgtaacgatagaagagagtcgatacaatgtattgaaaaaggaagaactactatttgatcaaaactttctaaaagaattgacaaaaagatatgtgattattaagaagaagtatgccgcggtaatgatcgttggattttgttttatagcagcaggcgcgatcccgtttttgtttgagaaaaagcatatcacttcaggggaattagttcagtattatccgtactgtgttgtacttattgctatcggagtttatctttttgttcgtgtgttaggagtatgggagatatatcgaattttagtagaaaataaggaatacagtaatcgttttatttttaaactgaaaaagaaagtaagaaaaaaggtagatagtttataaaagataaaaaacatgtttcgaatcaatgtattcaaaacatgttttttatcgttctgaattatttccaaagaaataattcagaaaaaacagaaaaatgtcgtaaccatttacggaagtctgttataataaacgaaaaatgaaaacgctttaaagggggatataaccaatatgatgatgaatgtaccgctaacaattagttctatgatggaaagagcagagaaactgttttcgaagaaagaaattgtttcacggacacatgatacagttacaacgttaacatataagcagttaggggaaaggacgagaagactttccagtgcgttgaaaaagcttggaattaaagaaggtgaacctgtaggaacattagcgtggaaccatcatcgacatgtagaagcgtattttgctattccaggtattgcttctgttttgcacacgattaatattcgtttatctcctcaacatatttcatacattattcagcacgcagaagaccgaattctacttatagatgaagatctcgtaccgctcgttgaaaatattcaatcacaattatcaactgtacaagcttacattattatgactgataaagatgaacttccaaatactatgctggagcctgtatatcattatgaaaagctattagaagaaggcgatcccaatttccaatttgtaaaagatattgatgaaaatacacctgctggtatgtgttatacgtcagcgactacaggaaacccaaaaggtgttgtatatacgcatcgtagtactgtattgcattgtatggcactcggtttagctgatacagctgctttatcggaaagtgacgcagcaatggcaatcgtcccgatgtttcatgtgaacgcttggggacttccttttgcggctacttggtttggatcaaaacaagttcttcctggaccgatgtttaccccgaaaattttattagagatgattcaatcagaaaaagtgacgttagctgcgggtgtgccgacaatttggctcggcgtattacaagagttagaaaataatagttacgatttatctagtatgacgagaatactatgcggaggtgcagctgcgccgaaaagcgttattaaagcatttgaacagaaacataatgttccattcatacatgcatatggtatgactgaaacgagcccactcgtaacacttgcacgtttaaaaagttatgaaacagaattatcgtatgaagagcaattagaaattagatcaaaacaagggtatcttgtccctggtgtagagatgaaagtagtcggtacaaatggtgaagtgaagtgggatggtacggagatgggagaactatgtttacgagcgccatggatcgctgaaagctattataacgataatcgtactgtcgaaggttttcgtgatggttggttatatacaggagatgtcgttacggttgatgaggaaggctgcgtgaaaattgttgaccgtacgaaggatgttattaaaagcgggggagaatggatttcttcggtcgatcttgaaaatgctttaatggcacatgatgctatatttgaagcggccgtcgttgcgattcctcaccctcagtggcaagagcgaccaattgcctgcgtcgttcaaaagaaaaatagtacggttacaaaagaagaaatatatgagtttttaaaaccacagtttgcgaagtggtggttaccagatgatattgtatttatggaagaaataccgaaaacatctgttgggaagtttttgaaacaggcgcttcggaaagaactggagcatttgcatagagagaaataagtgaattcttatttgtaaacttaaattaaataaaagttgacaaaagaagggtggaaagataatataattttcgtgatatgttacctaaaaacacttttaagtttacaaacaggagaagaaaatatgcatacaaaaaaattagttttcgtcgctttatttagttctattatgggagtgttagggttaatacctccgattgctctttctattacaccagttccgattacattgcaatcactcggtgttatgcttgcgggtggattgttagggtcacgccttggtgcattaagtcagcttattttcttacttattgtaggagttggagcaccattacttgctggtggacgcggtggccttggtgtatttgttgggccaagtgcaggatatttacttggttacatcattggagcgtttgttattggttatttaattgagcgtttacgtgaagtttctattataaaagtattatgtattaatataattggtggtattttcgtagtttatgtatttggtattactgtacaagcgtttttaatggatgtttctgtatgggagacaatgaaagtgagtgctgtgtttttaccaggggattgtataaaagcaattatcgcggcgattctcgtaacaaaattacatcgttcattgaaacatattattacgcccgctttaaagaatggaaaatatacaaatgcgggatgataaagggaagaaacacgttaattccgtgtttctttttattatttttgtaaagaaaggacgtctcatatgggtattacaaaagaatacaaaaagcatgcctctttacaaccaaataaaatagcgataaaggaaaatgatagagttttaacatataaagagtggttcgaatcagtttgtaaagtagcaaactggttgcacgcaacagaatcaaagaataaaacaatagcaatcctattagaaaatcgtatagagtttttacaactattcgctggtgccgctatggccgggtgggtttgtgttccgttagatataaagtggaaacaagatgagctcagagaaagaattgagatcagtaatctggatatgattgtgacagaacgatataaggtaaatgatctacctgatgaagaaggaagagtaattgaaattgatgagtggaaaagaatgatagagaaatatcttcctacacattccactgtagaaagtttacgaaatgctcccttttatatgggatttacatcaggatcaactggaaaagcaaaagcatttttacgtgcacagcaatcgtgggttcatagttttgattgtaatgtacatgactttcatatgaaaatggaggattcaattttaatagctgggacgctcgttcattctcttttcttatacggggcaataagtgcattatatgtaggacaaacggtgcacattatgagaaagttcattccgaatcaagtattagataagttagaaactgaaaatatatcggttatgtatacagttccgacaatgcttgaatctttatataaagaaaatagattaatagaaaataaaatgaaaattatttcatcaggagcgaaatgggaagctgaagcgaaagaaaaaataaagaatatatttccttatgcgaaaagatatgaattttatggtgcatcagagttaagttttgtaacagcactagtcgatgcagaaagcgaaagaaggccaaattcagtaggaaaaccttgtcacaatgtgcaagttcgaatatgtaatgaagcaggcgaagaagtacaaaaaggcgagataggaactgtttatgtgaaaagtgatcagttttttatgggatacataatagatgggggtttaacacgggagttgaatgcagatggctggatgacagtgcgagatgtaggctatgaagatgaagaaggctttatatatattgttggtagagagaagaatatgattttatttggaggaatcaatatttatccagaagaaatagaaagtgtattacatgaacacccagctgttgatgaaatagttgtaattggtgtgaaagatagttactggggtgaaaagcccgtcgcgatcgtaaaaggaagtgctacgaaacaacaattaaagagtttttgcttacaacgattatcctcgtttaaaataccgaaagaatggcattttgtagatggaataccttatacaaatagtgggaaaatcgctcgtatggaagcaaaaagtatgattgaaaaccgggagaaaacatatgaataaggcagttattgtagaggcgaaaagaacacctatcggtaagaaggatgggatattaaaagagtatgaagttcagcaattagcaacgccgcttcttacgtttttaagtaaaggaattaagagagagatagacgatgttatattaggaaatgttgttgggccaggagggaatgttgcaagattatctgctttagaggcaggacttggctatcatattcctggtgtaacgattgatcggcaatgtggtgctggtttagaagcaattcgaactgcgtgtcatctcattcaaggcggggcaggtaattgctatatcgccggaggagtagagagtacaagtacgtcaccttttcaaaaaagagcaagattttcacctgaaacaattggtgatcctgacatgggagtagcggctgaatatgttgcggagcgttataacataacgagagaaatgcaagacgagtacgcttgtcttagttataagcggacactgcaagcgttagaaaaaggatatatacatgatgaaatattttcttttaatggattattagatgaatctataaagccagaaatgaattatgaacgaatcattaaaagaacgaagcccgcatttttacaaaatggaacagtgacggcaggtaattcatgtggtgtaaatgatggggcatgtgctgttcttgtaatggaagagggacaagccctaaagttcggttataaacctgtccttcgtttcgttcgtagtactgtagtgggagtggatcccaatcttccagggactggtccgatatttgcggtgaacagattattaaacgaaatgaatgtaaaagtagaggacatcgattattttgaaataaatgaagcattcgcctcaaaagttgttgcttgcgcaaaagagttacaaattccgtatgaaaaattaaatgtaaatggtggggcaattgcgctcggtcatccgtacggtgcatctggggctatgcttgtaacacgtttgttttatcaggctcaaagagagtttatgaaatatggaattgctacattaggaattggaggcgggatagggattgcgctattatttgagaaagtagaagactagtgaggtaactagttttctactttttgaggaacataaacattgctgccaggcttcgctttcatttcgttccaagcagcaatcgcatcagcttttgcttttcctttattatttggatctttgaaaaagtcccgagtaaagcgattgtattcaaattgcgcgctgatcgttgttttataagtaggatctttttttcgttcgttttcttcataccaaaatgttatcgcgtcttcatatgtttttccaacattctctttaaaaaacttttgaagagctactgtaaagcggaagtttgtttcgattttttctttgaaaaaagcacgaacatcttcgctacagcggtgatttttagtaataatcgtttgaagagaaaggtctttataagagaggggagctttgctcacttttggcacagagctgttttttaagactttccccgtagttaaataatgtgagatacgctcggttatttcgatcttagagccactagctggcagaccatgctcgcgacaaaatgtttgcagttctgcttttaaccaataataattttggaaatctgtaagagatatagtttttgttaaagatggtcgcatgaatgtaacaactactttcttccataattttctttaattataaaacatacgttctttttatggaaggattaatgtgtaaatataatgggaagaggaggttatatatagaaaatataatgcaagttcgtgttacgggaattttaattgaagatgaaaaagtattgctagtaaagcaaaaagtggctaatcgcgattggtctttacctggaggaagggtagagaatggtgaaacgttagaagaagcgatgattcgagaaatgagagaagaaacaggattagaagttaaaattaagaagctactctatgtttgtgataaaccagatgctagtccatctttgttacatattacgtttctgcttgaaaggattgaaggtgaaattacactaccttctaacgagttcgatcataatccgattcatgatgtgcaaatggtaccgattaacgaattaagttattatggtttttcggaaacttttatcaatcttataagtggcggttttgcaaatgcaggaagttatcaagggttgaaacaacatataggcctgtaaatatagttgaaggatagccgttagctatccttcataaacatgttttacactgctgactgtaaagaagaaacaagctgatttaaaaactcgtccccgttcataaccgcttttccgccgccgcgtgcactctttttatttccgccaccttttccttcaattgtaggaagagcatcttttaaaagagcattcatatcgagcgttactgtttttccgcaagcgagaatacattgtagtttgtcatcattttcaataacgaaatacgtaattgcatgctcttgttgttctgtaatgatagctgatatttttgcaatttcttgcatagaacgatctgtaaatgctttagaaataagtaacccagcatgtatttcggtgggctgttgcagtaattcatttgcctctgcaaataataatttttcattcattgtttgtgttgttttttcgttttccttttgagaggtaagaagctgtgccacttttgctgggatatcagtttcgctactgtttaattgtttggaaacatctttcataatttgttgctgttgccccattaatttaagtgtacgccaaccagcgataaaggttaagcgtataccacctttattgcgctcccatcctagtacttgaataagaccaacttcaccagtgcgtttcggatgggttccaccacagccgttgtagtcgtaattttcgataataacaacgcgtatattttctgttatattcggttctttacgaagaggtaatgttttcgcttcttctaagttcatccactctatacggattggatggttttcaaaaacaattttgtttgcaatttgtactgctttttcaactgtttctgtatgcagattttctgtttctaaatcgattgttaccgtttctttaccaagatggaatccaatcgtaggtatgttaaaatggtcccaaaaagcagcagataaaatgtgctgagccgcatgttgctgcatatgatcaaaacggcgctcccaattaattttaccttctacgtcttctgtatgtaattgttctgcgatgtagtgacgaatttctccgtttatctcttctacattgattacattgatatcatttaatgtaccagtatcatatggttgtccgccacctgtcggataaaatgctgtttcattcaaaacaacgtataagttaccgtttttatcataatcttgctttataattttagtagtaaagtcttgcttataagcgtcagtgtaatataatttgtgctccaattttctttctcctctcgcattaactagtttcattgtaaagcaattgaaattagtttcctaatatttcagaagaaagaaactatttttagaattttcttgctataataagaagaaaatgcgggggtggaataaatatgttatatgaaaatggcgtagataaactgcttagtttaagcaaaaatatttctgaattgtatcgagaattaaatgaaatgacccggattttaacggagtgtaatcgagaaagtgtgaagtttgatcggttatatgtaaaagagttactttggaagaaagaagatgtaatagagaaatatgaccagctacttgtacaactttgtattaacgaatgctttgatctaaaaagtgtcattacaggcgaatataagtatacatatgaagaagtggagaacatcgttttacaatttaatgagaagtataatgttgcaatattaattaaagatgtttgtaaagaattacagtttacatatggcatagatatggatataacgagaacagcgcgggtatcaacagcgcaagtataaaaagggaaaagaaagcagatcctttgctttctttttttatgtaagaacagggagagtaggtttttaagatgaaggggaagttgcaaaatattcatccgttaggaatgacaattataatagggactttatttgcgaggtttgccacgtcaatgagtattccttttttagcaatttatttaacgactgtgaaaggtgtatcagctggaatgacaggtgctattatcggaacgagtgcacttgttggagtgtttgctagttttatcggagggaatttatcagatcgattcggtcgaaatatgattataatatggtccatgatcgtttgggtctttgtattcattggtttttcacttgcagatcatgttttaagtttctttttattaaatgctttgaatggattatgtaggtcattttttgagccaacatcaagagcgttattatcagatttaacgaaacctgagtatcgtttactcgtatataatttgcgttacggtgcaatcaatgttggagtagcgattggcccacttgtcgggttacagattggaagcgcaaaatcaacaattccgtttttagtagcagctggagtatacattttatatacagctatattagcgttccaatttaagaagtatccgattgaaaaaaagaaagtaaatacagaaaagcctgtcacaatgttaaaggcaattcgtattttgcgaaaggatgtcgtatttttagttgcactagttggtattattttgagtaattgtggtttttcacatttaacgacaacagtatctcaatattttgcaaatgcacatatatttcaggatggagtgaaattattttcatatatgctagctttaaatgcgattgttgtagtcgtaattcaataccctgttattcaaatttgtaaaaagtatacaccgttaacatcaattatggtgggggctttatttgtgagtgggggattatttggctttggaatagtagaatccatgctaggtgctgccgtttgtacaattatttttacaattggagaagtcttaatgttttcgatgacggatgtatttattgatgatattgctgttgcgcatctaaaaggaacatacttcggtgcgatgggcttttcgggaattggagcagtaataggtccgtggtttggaggagtacttctcgattactacgggtaccaaaatgggtttgcagtattttcagcattagctacattctcaactgtggcatttcctgtgcttttagttacaaaaggtttattgaaaaaaaggtatgatagaaattctaatatagaaatgcatgcgaaataacataagccccagtaccaactggggcttatgtttgtattatattaactcttaatttgaaaaaagaactttcttttcatgtttatcagcaacttcatttttggaaatatgaatggccaaaaaaccattctctaagcaggctagcatcttcttataaataacattagcgggtaaagggatagttcgctgcaaagaaatgtttttatgaagtatgcaaatggttaggcctgtctccatctttttaatgactacattttgttcattggcatttggtacatctgtttccaaaatgtattcttgttcagtttcgcaaaggtcaatatgaatttgatttgggaaactaaagttactacaagagtcagaacaaaactgatccatccattcttcgaaaccatcaacatgaaaaagacaatccttctttttcttgcccatgtaagacaccctccgtaaaatctcaattcatactatgttatgcatgaatgaattaggggtgaagaataaatggaaaaatataaacattgtatgtggaaaagatagctagtgtgcactttttgttttacatatcatgatgcgcatgatgtttttggcgtgaatggttacggttttttactttatgagatccgcttaatggttcaggttgtccttttttttctttcgcttcacgattgttttttcccattgtatgtgacacctcctcttcctttttagaatgagagaagtttgcaaatttatacgagaatgtttttagaaaaaaaggtaaagataattgggactaactattacagaaaggggattatataatgccatatcataaagataaacaacaagcgtttcaagcagcgcagcaaggcgttacacaagcagaaaatgcatttaacaacattgtgaaaaatgatccaaactacggtcatgatttaaaagaattacgccaagaggttcaggaagcatatgaacaaattcaaaatgcactagaggtagcttcagaaacacaacgtccacaacttgagcaatatgaaaataatctccaaaatataatgcgaaatgtagatcaattagaaaagtaaattaggttgttgtgtatttgacaacctaatttactttaatgaacattatgcgaaaacagaaaatttttctattcgttttttctttattatgcgcagtacatatatttcaagttgaaaaagtggaagcgaaaatgttgctcagaaaagagctagaaccaactggctatgtaacgtgggaagtacctaataatgaaaaaattattgccattacatttgatgatggaccagatccaacatatacaccacaagttttacatttattacgtcaatataaggctgaagcgacattttttatgattggatttcgagttcagcgcaatccatatttagtgaaacaagtgttaaaagagggacatgagattggaaatcatacgatgaatcatttatatgcaaatagttcatcagatgaaaaattaaaaaaagatattttggatggaaagaaatttttcgaaaaatgggtgaaagaaccgttgctattccgtcctcctggtggatatattaacgatgctgtatttaaaacagcaaaagaagcaggttatcaaaccgttctatggtcgtggcatcaagacccacgtgattgggcaaatccaggggtggaatctatcgtaaatcatgtagtgaaaaatgctaaaagtggcgatattgtattgttacatgatggaggaaatgatcgtagtcaaacggtagcagcactagccaaaattttacctgagctaaaaaaacaaggctatcgatttgtaacggtttcagaattgttacgttataaacattagaaaaaatcccaaaaggtgaatgttccttttgggatttttcgttactggttctttttgcgtttcttattattttgtctttctgcaggagttaagttttcatttgcaaactcttcgttataaccagtaccttgtccttgtgcggatgctgcattcattcctgaaatagtatgatttgcttttcttttacccattttatttcacctctataacatttttttgtatgttgaatgatgagcagttcatagtgtgtatgaactataagtaaagcgctaatagagcactttactttatggtaatagtattcataaggagcatgaacactattcaaatttagaaacataaagaaaacttatgataatctataagtttcttattatttacttatttagaaagttgtaataagatattatcgtaaggtattgaaaagtttgtctacattttatattcagacaacttagtcacgtttaacaggggggaaacataatggtcaaacataatccatttcaatcacgtgcaacttttgaagtagatggaaaaacgtatcattattatgatttgaaagcgcttgaaaatgcaggggttggcaacgtatctcaattaccatattccgtgaaagttttacttgaatcagtacttcgtcaagtagacggacgtgtaattacagaagagcatgttacaaatttagcgaaatggggaacgaaagatgtgcaagatatcgatgttccatttaaaccatctcgtgtaattttacaagatttcactggtgtaccagctgttgttgatttggcttcgcttcgtaaagcaatggcagacatgggtggagatcctgataaaatcaatccagaaattactgtagaccttgtaattgatcactctgtacaggttgatagagcgggtacggcagacgcgcttgcattcaacatggacttagagtttaaacgtaatgaagaacgttataaatttttaagctgggcacaaaaatcatttgataactatcgtgcagttccaccagctacaggtattgtacaccaagtaaaccttgaatatttagcaccagttgttcatgctgtgaaaaatgctgaaggtgacttagttgcatacccagattcattagttggaacagactcacatacaacaatgattaatggtatcggcgttcttggatggggtgttggtggtattgaagcagaagcaggaatgcttggacagccttcatacttcccagtacctgaagtaatcggtgtgaaattaacgggtacacttccaagtggtacaacagcaactgacgttgccttaaaagtaacgcaagtattacgtcaaaaaggtgtagttggtaaattcgttgagttcttcggtaatggactaaagagcatgcctttagctgaccgtgcaacaatttcaaatatggcaccagaatacggcgcaacttgtggattcttcccaatcgatgatatttcattagaatacttacgtttaacaggtagagatgaagaacaaattcgcgttgttgaagaatactgtaaagcgaacggtttattctatacagcagacagtaaagatccaatctacactgatcttgtagaaattgatttaaatacaatcgaatctaacctttctggaccgaaacgcccacaagatttaattccactttcagatatgaaagatgcgttccacaaagctgttttagcaccagttggaacacaaggacttggatttaatgagcaagagttcgataaagaagtgaaggttacattagaagataaagaagtaacgatgaaaacaggtgcaattgcaatcgctgcaattacaagctgtacaaatacatcaaacccatacgtattaattggagcaggtctagttgcgaagaaagcaattgaaaaaggacttgtagtacctgagtatgtaaaaacatcattagcaccaggatctaaagttgttactgagtacttagataagtctggtttaacaacatatttagatcaattaggtttccaaacagttggttacggttgtacgacttgtatcggtaactctggtccattagcgccagaattagaagaagcaatcgcagcaaacgacttattagtaacatctgttttatctggtaaccgtaactttgaagggcgtatccacccacttgtaaaagcaaactacttagcatcaccaccactagttgtggcatatgcacttgcaggtactgttgatattgacctgaaaaatgatgaaatcggtaaagatgcaaatggcaatgctgtttacttcaacgatatttggccatcagctaaagaaattgaagatgtagttcaaagtgttgttacatctgaactgttcaagaaagaatatgcacaagtatttaacagcaatgagcgttggaatgaaatccaaacttcaaacgaagctttatatacttgggataatgattcaacatacattcaaaacccaccattctttgaaggtttatctaaagagccaggtgaagttgaaacattatcaggcctacgcgtagttggtaaatttggtgactctgtaacgacagaccacatttcaccagcaggttcaatcggtaagcatacaccagctggacgctacttattagaaaacggcgtacaaccagttgactttaactcttacggttctcgtcgtggtaaccatgaagttatgatgcgtggtacattcgcgaacatccgtattaaaaaccaaatcgcaccaggaacagaaggcggatatacaacatattggccaactggtgaagtaacatctatctatgatgctgctatgaaatataaagaagatggcacaggtcttctagttgttgctggtaaagattacggtatgggaagttctcgtgactgggctgcgaaaggaacaaacttactaggtattaaagcagtaattgcagaaagctttgagcgtattcaccgcagtaacttagtgttaatgggtgtactaccacttcaatttaaagatggcgaaagtgctgaaacgttaggtcttgttggtaacgagtcatttgaaattcaaatcgacaaaacagttagaccacgcgatcttgtgaaagtagttgcaactgatgcagatggcaatgaaaaacaatttgaagtagtagctcgtttcgatagtgaagtagaaattgactactaccgtcacggtggtattctgcaaatggttcttcgtgagaaaattgaagagtctaaagtgtcgaactaaataattgaaatgaataataaggaagctaacaatagttagcttccttattttatggaaagggatgaaaccatatggtttcatccctttcttttttactacgaaaaatggaggaaacgtcatgaaagaatataaaagaattttgttaccgttacagaaagaaaaaatattagtaatagcagctgtatgtagtgggataattgctgccattttaaatttatcccgcccaattttcatgggattaattgtagacaatcttattcaaagggagctaaaaggtgcgtatgtatatatagctttgtttgcgggtagtcactttttaatgtgggcgaacaatcttttatttgattatataagttcaaaagcgagtcaacgtatattacaaacgaaacgtatagaattattgcgtcactatttctcattaccgtttgaagagagtgagaagattaagcaaggagagttagaaactttggtcgtgtctgatattccgaactgggtcagattatatggctctatattaatagaatatatacacgctattgcccaatttattggagctttcatagcactacaacatatagatatacagtttatattgtgggtaactccgtttttatttttaagtacaattgttccaatactgatgggagaaaaggtaagagatattgcaagcgtttctcaaaaaaatcactcaagtgttgtagagatggtgtcacagtttgtaaaggggatacaagatttgcggagtttacaaaaagaaaaatgggcaattcgcttatttaaagaagtaacggcacaatcgtataaatcagaagtaaagaagacgatgatgcaacattgcattggagtagttggaacggtgattgaaacaggagcatatattgttgttctcattataggtgcacaaaaaataatgaggggagaaatagaagttggttcactcattgcagtgttagcgacaattgagatgctctttttccctgtccgttatgtgggcgatttattaataatgacacaagttgcagtcgcttcggcaaatagagctttttgctttttaaataaacgagcagcagatagcaatgtagaaagagcgatggggatcaggataacaaatgtttcatttcaggagaatgacgaagagaaatgcagaattcataatattgatttgcaaattcgtcctggtgaactcgttatgattgtgggagaaagcggtgcaggaaaaacaacgcttttaaagttaataacgggcttgtataaaccatctaacggtagcattgcttattatggtaatgaagctcgtatgactacagtgtggcaagaaccacgttttttccgaacgacggtaacagagaatatgtatttcggggaagagggtttagaaaatcagttagaaaaaaatagtgaacttataaatgcaacgccgattattagagggttacctgaagggagtcaaactgtgctacataaaagcggtgaagagttttcgggaggcgaaagaaaacgtcttgcattattgcgcgcgattgtatcaaatccaactcttattattttagatgaaccgacggctgggttagatccgggcaatcaagaactggtttggaatatgattgaagggataggaagagatgtaacgagaattgtggcaacacatgatgtagagagagcgatgatagcagattgtgttgttgtcataaagaatgggactattgtggaatgtgggaatcctagagaattattaaattgcaactcattgtacaaagagttgcaaacaaaaagataagagatatgtaatgctcttatctttattccgctatttgccgggcagcccgattggtgagggctgattaaagtttcactttattcggtctcattaagttgataagtataagaattcgaatcactagaattaacttctttgacgagagtaagttgatttgtatctggattatatttgaaaatcttaattgtatgttcgctacttagtaatggattatattcttgaatagcgaatgtattttccgcgatttgtgtcatattactggtgggaacattttctatggaatcatgatttgtagaaatttcaacgactttttcactgttgaaaaataaaagaacgattactaaaataactaagcatattcgtatatagcgtagctctttggtgatagggtgttctcccaaaacaatcatcctttctatagctattctatagtagtaatggtagtcatcgtgaaaaaagtaataatgccgaggcctgccaaaaggataaatgagattaatgcgatatagagacaaatatgtccaactgttttttttcaggatctttactaaatagtgagataatccatgtgataattccgattggggaaaatataaaactaagaatatatagaagtatttttttaaataaattcatgagagctcctttcattgtaaaatgttctatgtatttctaattatatgattaaaaggtaaatatttcatcttagttataaaaattctgattatttagaatgtgaatatttccaagcttgtccgtataagctaaaataaggtatatagtattttgatgaatgtgttaaaagaagataatacgttagggtgatataaaatgtggcggaagcttacgattattgtagtgttactttgtttagcgggatatgcagcttatgaacagtttggttataaagagcaggcggtaaaagtgaagcaagaaaaaagtgaagctgcgatgaaagagattatcgcaaggaatggtattgagatagggaagagtgcaccggactttacattaacgaagttagatgggacaaatgtaaagttatcggatttaaaaggaaagaaagtaattttaaacttttgggctacgtggtgtggaccatgtcagcaagaaatgcctgatatggaggctttctataaagaacataaagagaacgtagaaattttagcggtcaattatacgccttcagaaaaaggtgggggggaagagaaggtaagcaattttgctaaagaaaaaggaattacttttcctattttattggacaagaacattgatgtgacaacagcttataaagtaattacgattccaacttcgtattttatagatacaaaaggtgtcattcaagataagtttattgggccgatgacacaaaaagagatggagaaaagagttgctaaattaaaataatggtgaaaaggtagagatggagagttcccatttctgccttttctttttcaagtagtaatcacttcatgatatgatgtaagaaatataaccgtttagagataaaggagtgtatggagtggggaatgtatccttaccgttagattatgttgtaattgattttgaaacaacaggatttaacccttataatgataaaattattcaagttgcagcagtgaaatatcgtaatcatgaattagtagatcaatttgtttcatacgtgaatccagagcggccaattccggaccgaataacgagtttaacaggtattactaattatcgcgtttcagatgcaccgacgattgaagaagtgttacctttatttttagcatttttacatacaaatgttattgtggcccataatgcttcttttgatatgcgctttttgaaaagtaatgtaaatatgcttgggttgcctgaacctaaaaataaagtaattgatactgtatttttagcaaagaaatacatgaagcatgcgcctaatcataaacttgaaacgttaaaacgaatgcttggaattcgtttaagctctcataatgcatttgacgattgcattacgtgtgctgctgtttatcaaaagtgtgcagctattgaagaagaagggaaacgaaaagtaaataaggctatgcttgatgaaactgcggtatatgaagcggtgaaagaaatacttgcatgtaataaacgtaatgtagaatggctacgttgtatgaacgtaggaagttatttagatataaaagctttttatccagttatgagattaaaggtaaaagggcgaaagaaatatgtattaacagagatattagaagaagatgtgaaagaaatatgtacaagtttaaaatgtgaaccggcgttaaaaagtgaagctggtaatacgagaattatgcttaatagcttagaggatgttatgaaattagaaagttatattttagagcagtatgattttgtattacaggcgcttcatgattataaagaaaatgaaatgaatgcagatgaaaagttgaaagagtatttaaatattatggtataaaaaactccgtgtgcaatatattgtacacggagtttttttaggagtactaaaacataaaattttcttgcaaatctgattaaagagttttttgtttgctcatactatgtaataagaaagcgaaggagagagggtgaacaacatgagaagaagtcgccgtaaatcgtttgaagaacttgtaaatgaaaataaacaacaattattaagcgatcgtgaggcaattgatcgcattgaagagcgcattgaaaaacgttatgaaatgaaactttttaagcaagctgaataattcttaacactagtacgatactagtattaaggaggcgatagtaatgggtaatccgaaaaaaaattcaaaagattttgcaccgaatcatattggaacacaatcaaaaaaagctggtggaaataaaggaaagcaaatgcaagatcaaacaggtaaacaaccgattgttgataatggttaaagaaaaggagaatattacattctccttttttatgtataaatttgaggaaagataggtaatttaagatggtgtgtatatacaatattaggagggaagtacatgccaaatccagataatcgaagtgacaacgctgaaaagttacaagaaatggtgcaaaatacagttgataactttaatgaagcaaaagaaacagcggaactttctaatgaaaaagatcgtgctgctattgaagcaaaaaatcaaagacgtttagaaagtattgactcattaaaaagtgaaatcaaagatgaatcttaacaaaatgtacaaaaagggctgacttttgtcagccctttttcgtaatcgtaaagttttcaacaagtaaacgccaattttgtggaaatggcaagccaatcttccaataactaataccgccaatgccctgctctttcattaaattgaatttactttgaatagacctcgcatcttcaaaccaaacttcatgttgtacgccattttcgtcaaagtaattaaaatgtggagcttgagctgtgaaatcatagcggataggaacattatatttacgagcaagtgcaacagctgcgacagagctaactgcttttgctggtggattcccttgtttgaacggaagtttccaatcgaatccgtataagttttgccccatcataattttttggggaggcatttgagattttgcgtattgaagtacttcttttacaggaccgataggagagattgccattggtggcccgccctgccaaccccagtcatatgtcataatgacgacgaaatcaacaatttgcccttgcgctttataatcatgggcttcgaaaaattttcccttttgatttgaacttgttttcggtacgagagttgtgcttaatgtgtacccgctaggtaagcgtgtttttacatttcgtaaaaagcgattatacgcctcgcggtcttcgggtgctacactctcgaaatcgaaatgaatgtctcgcatgccatatttttcagctgtttgcaaaatgttagtaataaatttgttttgaatcgttgcgtcgcgtaaaataaccgatgttagatcggcactgaaattaccattttcaatatttgtaataacgagcatagggattgtttgcccttgcgttgcaatattagcaattttagctgtttcagtaggttcttttaatgtgccatctctttttgcctcaaaactaaaataagctaaatatgttaaaaatggattgatggcacgtgtagcattaactaaactctctttaatcggtatagtggaaggttgtaaataagcgatggattctacagctcgttttgtgccttttggtacatataattgttgtccgacatggagaatagattttaaagataaattattaactttagctaaactagcgagggggacattatatgtttgagaaatccgatagaggctgtcaccaggctgtacataataattatttcctttcgtattaacgataagtgcctgaccaacaacgagcgtttcagcgggatttagtccattgtcttttactatttcgtcaggtgttgatccatattttgatgccaagctatatacgctatcaccgctacgaaccgttacaatttgaatcatatgcttgctcctttcgggaaaagattcactatttttattttatttttgatgtcactgtattatgattaaatgtatgcaaggtagcagaagtgaaagaagggaagaaacagttagtgtatatctacaaaaatatataattagtgataaaatatttgtagatgaaaaattgtcgccggagtaaagtagtttcatgggatgaaaaatatgaaagtatattcaattggtgattttgcaaaaaaaggcaggtaggatagaacaaactagttgccatcttcaagggaaaataagctaagaagatggttaaggggttgctggaaaatgatgcttgcgaagaaagtgagaatcaagccgaataaagaacaagaattgcaactttggaaatctgttggtacggcaagatgggcttataattggacactggcgaagcaagaagagaattacaagaatggcggaaagttcatatcagacgtttttttacggaaagaattaactgtattaaagcagtctgaagaatatgcttggttgtacgatgtttcaaataatatagccaaacaagcgattaaagatgcttgtgaagcatataagcgatttttcaagggactggctgataaaccacgattcaaaagcagaaggaaagcaaaactctctttttacaatgataatgtcaagttaaaagtaaaagaaaaacaagttttgattgagaaagttggttgggtaaaaacatccgaaaagttacctgtaggggttaagtactctaatccacgcgttagctttgacggtaagtattggtatttgtctgtcggtattgaacaggagtttacaaaagagaaattaacggctgtttcgttaggaatagatattggaatcaaagaattagcatattgttctgatgggcagaggaagaacaatatcaacaaaacaaaaatggtaagacaggtagagaaacgccttcgtaggttgcaacgtcaagtttctcgtaaatatgaaatgaataaggagggaaaccgttttgtcaaaacaagcaatattataaaaatcgagaaagagatacgacaactacatagaaggttatcaaatatcagaaagaatcatcttcatcaatccacgagcgaaattgtgaaaaccaagccatttcgcattgtgatggagacgttgcatatgaaaggtctgctgaagaatagatacctagctaaagcgattgcgaagcagtgtttatatgagttcaaaagacaaattcaatacaagtgtgaaaaatatggtattgaatttgtagaagctgatacatggtatccttcttcaaaaatgtgttccagttgtggaagcattaacaaagaactaaaactttctgaccgtgtatacaaatgcacttgtggtcacgaaatggatagggatttaaatgcggctatcaatttgtcacggtatgaattagccagttaacatctaaaaaagttacggctaatatgtaggattcgttgtatccgaatttacgccctcggagtgttacatcaaacgaaagtagcttctgtgaaatcggacacgtagaacagggaaataaacaaaaattatagatttttataagtttatggcaacggcgaatatacatatgtttgtagcagaacatgaagttgaaatccgttatgcggaaacagatcaaatgggtgttgtttaccattcaaactacttagtgtggcttgagttaggtcgcacgaaacttatacaagatttaggtttttcatatgttgaaatggagaaagaaggaattatttctcctgtgttagatttacaaatttcataccgtaaagcgatgcgttacggagaaaaagcaatcgtaaaaacatgggtagatactgtgagcccacttcgcgttgtatatggatatgaaatatataatggtgatggtgaactttgtattactgcaagtacgacgaatatttgtgcgaaaaaagaagggttccgccctgtatcatttaaaaagttatatcctgagtggtatgcgaaatatgaggaaattaagaaaaaataaaaaagcgtggcagaagccacgtttttttatttttcataattaaattgtgggaagtcgtcaccttcgttaagtgtaacagataaattatgtccatcgaagaaccattcatcatcgccttcaataaagaagttaataccttcttcttgaacttgaacagcaggatgtgcaggatcatctttacgaatccctaaagaaagtcctttttgcacagtactgcaaccaccgtattgtacgaaaaagcgtagtgtttcatttgattgtaagtttaattcatttttataccattgtgctgcttcttttgttacggaaagattcatgtatagttcctccaaattatgttgctttttctttagtataaaaaataacgcaaaaagacgctattaatatgcttcacgttttctttttgcgttatgtgggttacgatcttatttttgcttttttgaaaagtttgcttttggttcagttttatttataattcgtccgatatttgcacggtgtttataaataaccatacctgctaataaacacatcgcaataatgaagattttatccccgctaacaatggatgcaataacagcaacaactgctgttaccatagaagaaagtgatacgtatcttgttgtaaataaaagggtgaaaaatacaacagccaatattgcaaaaacaactggtgaatagcataatagcaccccagcagaagttgcaactgctttaccaccgcggaatttcgcgaagattggatagacatgtccaagaacagccgctaacccgaaccatagtggatgaatatctaatccgaaaatcattggtagacttgttgctaatgtcccttttaaaatgtcagcaattgtaacggtaaaacctgcttttttccctaatgtgcggaatgtgtttgttccgcctagattaccgctcccgtgctcacgaatatcgattccgtagccgatttttccaacaactagtgcaaatggaatcgagccaagtaagtaggcaacgataaataaaagatatgtagtaaccataagttcagtctcctttattcaaatgtgttgataaagggtaaaaagagtttttcccgtatattgtaccatacatttgtaaagagcacatttcttttttgtaaatgaaaaattcattatttcgtgaaaaaaatttcacagtaatgttacatttctcacagaaacagtaagactatatgtagtaacattttaatcaaaagataacaacatattggtggagggttataaatgttacaaaataatacacgtggagaagaagaattaatgaaagtgttcgagacaatagtccacggcaatgaacaagatttaatgcaagaaaatgcaaatgtagacggccgctctccaatgggcgtaatgggaacgttcgcatctgagagtgcaaaatattatgctgttgagaatttattgtcagatcaagtgaaaaaagcgataaatgaaaatatattatatccacatgatttagatttttatgcgacaggaacgacgacttgttcacaaattccgttagcgcaaatgcttgctaacggttttcatactggacatggacatatgagacaaccgcaagacattaaaagtgcattggctctttcgtctattatttttcaagcgaatcaaaatatgcagcatggtggtcaatcgtttgcactctttgatattgatttagcaccttatgtacgaaaaacaattgagagacataaaaaacgattacaatcatatccgcttacgaaagaacaaatagaggaatttgcatggaaagaaacggaaaatgatacgtatcaagcgtgtgaggctttcgttcataattcgaatagtatgcatagtaggggcggaggacaagtaccatttatttctattaattatggaacagatacatcaaaagaaggaagaatgttaattaaacaacttttaaaagcgacacaagctggacttggtaaaggagagacaccgatttttccgattcaaattttcaagatgaaaaaaggtgtaaattttgaagaaagtgatccgaactacgatttatttgaattagcattagagacaacggctgaacgattgttccctaacttttcatttttagatgctccgtttaatgcagtacattatgatggaagaccggaaagtgaagtatgttacatgggatgtcgtacccgtgttatgtctaatatacatggagaagaaacagcgattggtagagggaatttatcatttacgtctattaatttagtgaaattagcgttaattagtggttcaaaagaagcgttttttgaagcgctaaactattatttagatttaggaattaagcagctattagaaagatatgcgtatcaatgtacgaaacgagcaagagattttcagtttttatattcacaaggtgtatggcgtggtggagaaacgttgcagcctgaagactccgtagcctcgattttaaaacaagggacgttaagtattggttttatcggtcttgcggaatgtttagtagctttaacaggaaagcatcatggggaagatggagaatcatggaaacttgggtatgaaattatttcctttatgagagatagaatggataaagcgacagaagaacatcaactgaatttctcagtaattgcaactccagcagaaggattatcagggaagtttgtgaaaaaagatagagaagaatttggtgaaattaatggtataacgaaccataattactatacgaattcattccatattccagtttattataacattcaagctataaataaaatccgtttagaaggcccgttccacgctctctgtaatggaggacacattacttatattgaactagatggagcagcaatgcataacaaaaaggcattaaaacaaattgtacaagccatggcagaacatggcgttggatacggttcaattaatcatcctgttgaccgttgtaagtgctgtagttatcacggggttattgggaatgaatgtccaagttgcgggaataaagatgaggctaatatagaaagaattcgccgtataacaggctatcttgtaggagatatgtcgaagtggaatagtgcgaaacgtagtgaagagatagatcgggtgaaacataaatgaaagtgatgaatattattcatgatagtgtagtagatggagaaggattgcggacagtcgtgttttttgcgggctgtccgcatcgttgcgttggttgccataatccgaaatcgtggaatatttgcaatggaacggaaatgacagtagaagaaattgtgaaagagattgcaagtaatccattaactgatgtaacattttcaggtggagatccattttttcaagctgctgaagtgaaaaaggtagcaaaaatcgtgaaagatttgaaaaaaaacctatggatgtatacaggttatacgttagaagagatacagagttctcaaaataatgatatgatagagttgttacattatggggatgttttagtcgatggaaggtttgaaattgagaaaaaagatttaacacttccatttcgcggaagctccaatcaacgtattattcgattgaaagagtaaaaaggcgggatagattatatgaataaaacagtattgcttgttgaagatgaaagaagattacgtgaaattgttagtgattattttcgtaatgaaggttttgaagtaatcgaagcagaagatggaaaaaaagcgttagagttatttgcagagcatgaaattgatttaattatgttagatattatgttaccggaaatagatggatggtctgtttgtagaagaattagaaaagaatcagcagtaccaattattatgttgacagcacgttcggatgaggatgatacattgctaggttttgaattaggtgcagatgagtatgtaacgaaaccatttagcccgaaagtattagtagctcgtgcaaagacgttattgaaacgtgcggatggtgcggtaggagtagcggaagaaaatgctatgtctttagctggaatagaagtgaatcgtctatctagaactgttttagtagatggagaagaaattatattgacacataaagaatttgaacttctcgtttatttaatggagaacaaaggaattgtgttatcacgtcaacatttattagaccagttatggggatatgactattacggtgatgacagaacggttgatacccatattaaaaaacttcgaaataagctaggagataaagcgaagcatatcggtactgttattcgagttggttataaatttgaagaataatctagaacgatttgtgtaatttagcctagggaaatggcgattttatactctcttttgaaggtagaatgtacaaaaaatactttttttgtctacaatgttagataggagtatttttttaattagatttcacgatgagttcacaagaaggacacaaaacgtgactatactgaaaatacgaattcaccagagaggggaaataaaacatgggatattacgacggaccaaatttaaatgaagagcatagtgagacgagagaagtgagaaaatcaggtagtaaaaaaggctatttcttcacaggtttagtgggggctgtagtcggagcggtttcgattagttttgcagcaccatatatgccatgggctcaaaataatggagcgccagtatcatcatttagttcggattcaaaagtagaaggtactgtagttccagttgtaaataaagcgaaaaatgaaactgatttacctggtatgattgaaggggcgaaagatgttgttgtaggtgttattaatatgcaacaaagtgtagatccatttgcaatgcaaccgacaggtcaagagcaaacagctggtacaggatcaggtgttatttataaaaaagcaggaaataaagcatatattgtaacaaacaaccatgtagtagatggtgcgaataaacttgctgttaaactaagcaatgaaaagcaagttgatgcgaaattagtggggaaggacccttggttagacttagctgttgtagaaattgatggggctaatgtgaataaagttgcaagtttaggcgactcaagtaaaatccgtgctggtgagaaagcaattgccatcggtaacccgttaggatttgatggaagtgtaacggaaggtattattagtagtaaagaacgtgaaattccagttgatattgatggggataaacgaccagattggcaagcacaagttattcaaacagatgcagcgattaacccaggtaacagtggtggtgcattatttaaccaaaacggtgaggtaattggtatcaattcaagtaaaatagctcagcaatcagtagagggaattggttttgcaatcccaattaatattgcgaaaccagtcattgaatcacttgaaaaagatggtgtagtgaaacgtccagcacttggcgtaggtgttgtttcattagaagatgtgcaagcttatgcagtaaatcaattgaaagtaccgaaagaggtaacaaatggcgttgtattaggtaaaatttacccaatatcaccggctgaaaaagctggtttagagcaatatgatattgtagtagcattagatggccaaaaagtagaaaattcacttcaattccgcaaatatttatatgaaaagaaaaaagtaggcgagaaagtagaagttacattctatcgcaacggccaaaaaatgacgaaaacagctacattagcagataattcaactactaagaatcaataagtttaaaccttaattagtaaggttatccgcaaatagtggataaaagaaagtctctttcatattgaaagagactttctttatcggctatactaaaggaataggagggattaattatgacaattgaaaacccaactcgtacggaaattggtgaagtgttaaagaaaagcaaaacaattgcggttgttggattatcagataagccagaacgtacatcgtatatggtttcaaaagcaatgcaagatgctggataccgcattattccagttaatccaacagtagatgaggtgcttggagaaaaggcagtttcttcactaaaggatattaaggaacacgttgacattgtaaatgtatttcgtcgctcagagtttttaatggatgttgcaaaagaatttgtagagattgatgcagatgttttttgggcacaattaggagtacaagatgaggatacatacaaatttttaaaagaaaaagactatactgtaataatggatcgttgtattaaagtagaacatgcgatgacaaaatagtatagatttaaaggtagaaagattgattcagccctcattatagataagtagggccgatgaacgaggtgttcatcatgagattttttaaaggctgtttttgggggttgttatttgtaatcccattttggatcttgatcatttggatcataataaaggtttggaatgtgtaatcttggaatacatatccatttctcgttgacaaacgattatttttctgaaatagtagcctagaggaatccttgtgagaaaacaaggatttttctattgaaaatggtatataaaagagataagataacttgccaaaactatagtcgaggcgttattctataatagaaacatatgttctgattttggattaggaaaggggcaaggagtttggcgaagcatcagttccaatataatgaagatgcgattcaagtgttagaaggacttgaagccgttcgaaaacgcccgggtatgtatatcgggagcacggacagccgtggattgcatcatttagtatatgaaatagtagataactccgttgacgaagcgttagcgggatttggcgacgaaatttcagtcgtaatacataaagataatagtattagcgttatagataaagggcgaggaatgcctacgggaatgcataaacttgggaaacctacacctgaagttattttaactgtacttcatgccggtggtaagtttggtcaaggtggttacaaaacgagtggtggtttgcacggggttggggcatcggttgtaaatgccttatcagaatggttagtcgtaacgattaagcgtgacggaaatatttacgaacaacgctttgaaaatggcggtgttcctgtaacgacgcttgagaaaatcgggaagacgaaagagtctggtactacgatgcatttcaaaccagatacaacgattttcagcacaacaaattataattatgaaacattatgtgagagattacgtgaatctgcattcttattaaaaggaatgaaaatttcaataaaagatgaacgaaatgatttagaggatgtatttcattatgaaacgggaattgaagctttcgtttcatatttaaacgaagaaaaagattccattcatccagttgtatatttcactggtgaacaaaatggaattgaagcagaactagcatttcaatttaacgatggctactcagaaaacattttatcgtttgtaaataacgtacgtacaaaagatggtggaacacacgaagctggatttaaaacagcgatgacgcgtgtgtttaacgagtatgctcgtaaagtagcactattaaaagaaaaagataaaaacttagaaggcacagatattcgtgaaggtgtagcggctatcgtttcggtacgtgtaccagaagaagtgcttcagtttgaagggcaaacgaaagggaaactaggtacaagtgaagcgcgttcttcaattgatgccattgtatctgagcatttagcatactttttagaagaaaatcctgatgtagctacacttcttgtgagaaaagcaattaaagcagcacaagcccgtgaagcagcccgtaaagcaagagaagaagcgcgtagtggtaagaaaaagaaaaaatcagaaggtacgttaagcgggaaattaacacctgcacaatcacgtaacccgcaaaaaaatgaactgtacctagtagagggtgactctgccggtggttctgcgaaacaaggacgagaccgacgtttccaggccgtattaccgttacgtggtaaagtaattaatacagaaaaagcaaagcttgctgatatctttaaaaatgaagagattaatacaatcatttatgcgattggcggcggtgtaggaaatgaatttgatgttgaagatattaactacgataaagttgtaattatgaccgatgccgatacggatggggctcatattcaagtattgttattaacgttcttctacagatatatgaagccacttatcgaagctggtaaagtgtttatcgcacttcctcctttatacaaagtaagtaaaggaaaaggtaagagtgaggtaattgaatacgcttggtcagatgaggaattagacggtgtaacgaaaaaagttggaaaaggctatatgttacaacgttataaaggacttggtgaaatgaatgcggatcaattatgggaaacaacaatgaatcctgaaacgcgtacattaattcgcgtgaaaattgatgatgcagcaagagcagagcgtcgcgttacaacattaatgggcgataaagtagaaccgcgccgtaaatggattgaacgtaatgtacagtttggtatgcaagaagaaggaaatattttagaaaatgaaatgattatggagacggaggtggaataacatgcaagcagagaagtttcatgacctcccgcttgaagacgtgttaggtgatcgctttgcacgttatagtaaatatattattcaagatcgtgcacttccagatgcacgtgatggcttaaagccagtacaaagacgtattttatattctatgtatgtagaaggcaatgtacatgataaagcgtttcgtaaatcagctaaaacagtaggtaatgttatcggtaattatcatccacatggagattcctctgtatatgaagcaatggtacgcttaagccaaacttggaaagtacgtaatgttttagttgaaatgcatggtaataacggtagtgttgatggggacccagcggcagcgatgcgttatacggaagctcgtttatcaccaatcgcatctgaattattacgtgatcttgataaagaaacagttgaattcgtgtcaaactttgatgatacgagtgaagaaccggttgtattaccagcagcgttcccgaatttattagtgaacggatctacagggatttccgctggttatgcaacagaaattcctccgcatcatcttggagaagttattgatgctacaatgatgcgtattgataagccaaatagtactgttgatgatttattaacagttatgaaaggaccagatttcccaacaggcggtattattcaggggattgatggtattaaaaaggcgtatgaaacaggtaaaggtaaaattattattcgcggaaaagcagaagttgaaacagtgcgcggtgggaaacaacaaattgtaatcactgaaattccttacgaagtgaataaggcaaatcttgtaaagaaaatggatgaattacgtctagataaaaagttagatggtattgctgaagtgcgtgatgagacagatcgtactggtttacgaattgttgttgaattaaagaaagaagcaaacgccgaaggtattttaaattatttatataaaaatacagatttgcaaattccatataactttaatatggtagcgatcaataatcgtcgtccaacacttatgacattaccgaaaattttagatgcttatattggacatcaaaaagaggttattacgagacgttcgcaatatgaattaagaaaagcagaaaatcgtcaacatattgtagaaggtttaaagaaagcattatcgattttagaccaagtaattgaaacaattcgagcttcaaaagataaacgtaacgcgaaagataatttaagtgcaaaatttggctttacagaagcacaggcagaagcaattgtttccttgcaattatatcgcttaacgaatacagacattacggcgttacaagaagaagcagatgagcttaataagaaaattattgagctacaggcaattttacaaagtgaaaaaagattacttcaagtaattaaaacagatttaaagagagttaagaaaacatatagtgatgatcgacgcgcaattattgaagatcaaatcgaggaaattaaaatcgatgtagaagtgatgatcccacaagaagatgtcatcgttactgtaacgaaagaaggatatgtgaaacgtactggatggcgctcacataatgcctcaaatggcaaagacttcggtatgaaagagggtgacatcttacttgaacgattcgatacgaatacgacagagacagtcctcttatttacgaataaaggcaactatatatatctgccagtatacgaaatgccagatattcgttggaaagatttaggtcagcacgttgctaatatcgtttcactcgaccgggatgaaacaatcatttgggcaacggttgtaccgaactttgaggaagaaaaacgatttatcgtatttgtaacaagaaatggtatgataaagaaaacagaattaaatcaatataaagttcagcgttattcaagggcattcgttgctgtaaacttgaaaaaagatgatgaagttgtcgatatatttgcgacagatggaacgagtgatatcgttcttgctacacacggtgcatatgcacttattttccatgaagatgaagtaagtccagtcggtgtaagagctgctggcgtgaaagcaattaatttaaaagaagatgactatgtcgcttctggtaaaccgttaaatggtgacaaagatcaacttattctcgtaacacagcgcggtgctgtaaaacgtctaaaagcatcagaaattgaaaaatcaacgagggcgaaacgaggtcttgttattttcaaagaattaaaacgtaatccgtaccgcattgtcggtattgaaattgttcgggacgatgaattagtttacatgaagacagagaaaaacattgtagaagagattgatccgaaagcgtatcgaaataaagaccggtatagtaatggtagcctagtgctagatgttaatgatactggtgaagtagtagaaacgtggacgaagaaaagaccagaataaagagggcatcttgctatgaataatagcaagatgcttttttctaggcaatttattatataaataataataatcttgttataataactgaatgaaatcgttctcataaagtgaaactttaatcaatggggattttctttatccacactgattattagttaaaccaatcgggctttaacgagcagttgattcctcacctagttccttagttttcgctgaattttgagttaggaatcttactgcctgttaaagcgggacaaatggaggggcaacatgaaaaaaataggtgtagggattgtaggatttggtttttctagtacgacatttcatatcccactattacaaacgatagaagaatatgatattcgtgctgtattatcctcaaaagaagaggtagtaaaagaaacattaccaaatgctaatgttgttagtacaattgatgaattggtgaagcgagctgatgttgacttagttgttattacatcacctaatacaactcattttccatatgtaaaagaagcaattttaaacggtaagcatgttgttgtagaaaaaccatttgttgtctcaattgaagaaggggaaaagcttatttcattagcagagcagcataatataatgttaagcgtatatcataatcgtcgttttgataatgatttcttaacaattaagaaattgttaggagaaaacagagtagggaatgtatacgcatatgaatcgaattttgatcgtttccgtccacatgtacgtgatcgatggagagaaaaaaatctaccaggctccggtatattatacgatttaggatcgcatttaattgaccaagcgttatcaatattcgggaaacccgatgcgataagtgcagatgtaataaaacaaagaccaggtgcagaggtggatgattatttccacatagtacttcattacggagttaaacgtgtcattttacgtagtagcagttatgtgaaaaaagctggaccgcattttatagtgcatggagagaaaggttctatcgtgaagtacggtatggattcgcaggaagagcaattaaaaaatggaatgaagccaggtgataacggttatggagtagacgatgaagagaattttgctactttagaaacagaagaaagcttagagcgtattccaacagaagtcggttgttatgacaattattataaaggtgtacgagatagtatattaaatggtgagaaactacctgtaacagcaaaagaaggtttagatgttattaaactgattcaattagcgattgaaagcagtgaaaaaggtagagtcatttctataaaataaaaagacacgaaattcgtgtctttttattaggaatatgtgaatatgattaattatttagtttagtcgtttatcatacattaattggatttgtatgccataaggatcttcaataataccatatgcttcactaaatatatttttttctagcggagagattattttcacatgcttatcggaaattaaattattataaaatctttgtatttcttctaaattagcgctttgaatgcaaagtgacatgttatttccaacgttataacgttcattagtattcattgtatcttctgctatcattagctttgtattcccaatttgtaaaacagagtgagcgatatgttctttattttcacttgtaattttaaaagaacgatctcttttcgccagttcttcatacgtaacaaccattaattttttggcttctaaattacgtgtataaaagttaattgcctcctttgcttgcccattcagtgagagaaaaatagctatttctaatgtcataaatttacaactcctttattagttaataattataatatagactaaaaaggtttcaatacatgacacctttcgggaggtaaatatgaaaaaaacggaacgaataaatgatatgcttattttcttaaataataaaagaaattttaatttaaaagatttaatggttagatatgatatttctaaaagtacagctttacgagatattcaatcattggaagaaataggtgtacccatatattctgaactaggtagaaatggaagttataaaattatagaaaatagtgtgttatcgccaatttattttagtgtggatgaaatgtatgcgttatacttttcgattcttacactaaatggatacaagacaaaaccatttaatatagaaagtattgcgcttgaaaataaatttaaacatgtactacctgataatgtgagtaaaaacatttcgattatggaacgaacgctttcctttgaagtaacaaatcatagtaattttagtccgttcttaaaagaaattttacaggggatttttgctgagcgagtttattatttaacatatttaaaaaaagatgaggagaaagtattggtcgcccaatttattcgaatcgaatctaaatttggccagtggtatgctaaaatctttaattttgagacaaatggtgttcaaataattagatgtgataaaattctttctattgaggaaacaagcaacacgaattcaaaaaatcttgaagaactattaagttatcttacaaactttcacagaaaacctgatgcaattgattttagcgtcattgttaatcaaaaaggaaaggacatttttgataaagagaattatccttccatgaggatacaaaaagaaaatgaaaattatagtataacaggctattttaacaagcaagaagttgagtttatttcaagttattttctaaattttggtgaaacgattatttcaattcagcctgtgatgctaaaagagttaatctataataaggtgttatctataaagcagcatttaacttctttaagataaagttagttttagtcattttttgatatgaaaaagcccttgcgatttaaatatccaaagggctttttgatgattttatttgttctttagaaaaattacttttgtggaacagaaagaccatagaagaacatcgtaacgatatcttttatatgtttttcccaatctccttcaagaagttgtgctccaaattcatcacctaattttgtaaacatttgaatgtaaagtaacatcatttctttagtaaggtgtggattaatttcgtttttgcgctgagctcgttctaatatttctaaataccagggtaggattttttcattttgataactataaataaacttacggagttcttcgtccctttgcatcatttgtagtaacatatcaggttgaaataatccgccagtattcatttttcttacaatcattttttgcatcatatcatgaaaaggtaatttttcttctgcaagctctttataatattgaaattcagatatgataaattcttgtataagctccctaaataacgcatctttacttccgaaatgattataaattgtaacttgagaaacgtttgcttcttttgcgatatgttctattttcacttcattaaatccacgttctgaaaataataagaatgctgcttctttaatggcacgctttttcttttcttttactctttcaaagccgttcaatgcaatcacctcacttaaaatatacaagaaaaaataatggaaaacaataattttgaaatatagactgataaatatttcaaaaagttgttgcgaatatgaaagatgaggagtacaataattttgaaatatcacatattaaatatttcaaaaaatgaggtggaattatgatttcagttcaagatgtcacaaaacagttttcgaatggaaaaggtttgtttcatattacatttgatgtaaaagagggagaagtatttggttatttaggaccgaatggtgccggaaaatcaacgacgattcgtaatttaatgggatttataaaaccgacagctggtaaagcgacaattttcggattagattgttggaatgaagcagcgaaaattcaaagggaagttggttatctaccgggtgaaatttcttttattgaaggaatgaacggattagagtttttaaaattaatgcaaggaatgcgtggattaaaggatacgaaaagacgagatgaactgatagagcgtctgcaatttgatgtgaaaacaccgattcgcaaaatgtctaaaggaatgaagcaaaaagtagggatagtcgctgcatttatgcacgatccagaggtgttaattttagatgaaccaacatctggacttgatccacttatgcagcaagtgtttatagatttaatattagaggaaaagcaaagaggaaaaacaattcttatgtcttcgcatattttcactgaaattgagagaacttgtgacagagtagctattattaaagatggtcgactcgtaacagttgaaaatattcacgatttacaaagtatgagaagacaagtgatagatgtaacagtatcatcacaagaagagattgagtctcttacaaagtgtaatttgcaatttgaagcggtaaaaggcagagaggcatctatcattgtacaaggaaactatcaaactgttttacaaacactttcaaactacaatgtaacggcacttcaaacgagagcgatggatttagaacatttatttatgcattattacgataagaaagaagggataacgcatgaataagcaattatttttagctagtttgaaagaaacacaaaaaagtattttgagttatgcgtctggtgcagctttatatctgtggttattaatttggatattcccgtcaatggtatcagcgaaagggctaaatgaattaataggtgccatgcctgatagtgtgaaaaaaatcgttggtatggaaagtccgattcaaaacgtaatggattttctagcgggcgaatactatagtttattgtttattatcattttaacaattttttgcgtaacagttgcgacacatttaattgctcgtcatgtagataaaggagcaatggcatacatgctagcaacacctgtatctagagtgcaaattgcgattacacaagctgctgttctcatattgggacttctgattattgtatctgttacgtatgtagctgggttagtaggtgcagaatggtttttacaagataataacttaaataaagagttatttttgaagataaatgtagtcggagggctcatatttttagtcgttagtgcgtattcatttttcttttcttgtatatgtaatgacgaaagaaaagcactaagttattcagcgagtttaactatcttatttttcgtattggatatggtagggaagttaagtgataagttagaatggatgaaaaacctatcattattcacgctgtttcgtccgaaagaaattgctgaaggatcatataatatatggccggtaagcataggtttaactgctgtagcgctttgtatttttatcgtagcgattgtagtatttaggaagagggatttaccgttatagagtagaaagtccactgagaaagtgggctttttttatttgtaaatttaaactagtatgtttattgcatccttataaaggatatttatctttttaattacaaaaatattcaaaaaagtgaacctttttctaggttcatacgtctaatacatgtaaagttaaattggaagtgatgaagtgaggatgaagcaggaggagcgattgtgaaagtaatccctttatataaaatggttataaaagaagaaacggatgtttctttagcgaaaaaaggtgatcatgaagcctttatagcgcttatacatacagaaaaagtgaagatgtatcgaatagcaaaggcgatgttacgtgatgagacaaatatagaggatgcgatacagacaacaattttaaaagcctatgaaaatataaaaaaattaaaaaaagaagaattttttcacacttggttaattcgaatactaataaatgagtgtaacaatattattagagcgtataaaaatgtaattgtgacagaagagaatgattacaatatgagtgcgtgtgatcagtatgaagatatagatttgtgtaatgcgattcaatcgttacatgaagaattaagagctgttacggtgctttattattatgaagatatgaatcaagagagtatagcaaagctgttagaaataccgaaaggaacagtgaaatcaagattatcacgcgcgagggaacaactacaaaaacgattaaagatggaatagggggtgtaaaggatggataatgaaaaattatttgatgagaaattaaaaaagagaatcaaagatgaaaatgttatagtacctccagagttaaatgaaaagattaatggtacgctacataatcttaaggtaaaaaagaagagttacaaaattcatatgatgataattagtgcagcggtttgtatactttcagtggtatctatgtctgagttttctatacaaagttttgcgcaaaatggtggagtatttgaatatgtaaagaaaaaagcgttttctgattatgaaaatgaagaagaaataaaatcgaatgtacattatccagataaagaaaagattcatcaaaaaatgctagattctattgattattttaaaaatatttcaggacaatttgaggaatattctagctcatcaagaattgctacaacatataagtatgcgattgatacggagaaacaaagaggtatctcttcgaaagaagataaactagccaaaaaacgaacaattatatataacgagggcaagaaaaaagagtttgatgatgagaagtatacctataaagagacaaaatggaacccgaaagaaagaaacaatgaactattaaaattaaatcctacggaaaggttagtgagaaaatcagatgagaaaaagagatatgatgatgaatatgtagggctagctaaatatagtattcaatcagaattcgcagatttattaattcgatataaagattggaattataaagaaacgaaatatcttggattagattgttacaaaattgaaggagttataaacatagagatgcctgttagcacctctgaagatttaagagggaaattcgaaatggttgtggagaaaaatacagggattatgttgaaatttcttagttttcaagaaggcttgattcaatattcagttacgactgaatggatacaaatagataagggattgaaagaaagtatgtttcaaaaggatagcgctaaatatgaaaaaatgagaaacatattggatcaatagaaacaggaggagagtaaatggggaatcattcatctttaagagaagagaaaaataagcaaaaatataaaaagaaaaagataacaagtttactactggcggtattactatttggtggaattggctatggagcctatgtatatatgaaaacttctagtcttgtacaaaaatctaatttgaatttagcacgaggtgaaaaatccaatttacgtgagaaatctgtaaagccaattgcaaatcatgtttcacttttaattatgggaattgatgaaaatcaagaacgacaaaaggaatataatggtgcatttcatacagatgcattattgttagcgacttttaataaagacgataaaacagtgaaattaacaagcataccgcgtgatacatatacatatgttccagttgaaaagaaaaaagataaaataacccatgcatatggaagtggtttcgttaaaaatggtaaagatggaggaccgcaagcttctgtggaagcggtagaaaaattgttacaggtgcctgttgattattttgtgaaatttaattttggttcctttactaaaattgttgatgggttagatggtattgaagtggatgtcccagttgaatttacggagcaaaatagtaaagatgaacctgatgcgattcatttgaaaaaaggattacaaaaattaaatggggaagaagcacttgcactagcaagaacgcgccatattgatagtgatgcaatgagaggacagcgccaacaacttgttattgaagcgattttaagtaaattaaaaagtgtaggatcgattacgaagctagaaaaaatagttgaggcggttgatggtgattttaaaacaaatttagtaatggatgatattttatctttttataaatacggtttaaacggttcagttgaaaaaatacaattagctggtgatgatttatacttacctaatggcccaaacgggaaacgtgtatattattataatcctaataaaaaagatctacagagtttgagtaatactcttagaacacatctagggttaagtgaaaagcaaattgaggagaattaaagcagacgaaatgtctgcttttttatttttgtagaaaagatgtttttacatatatgcattatttattagcaataattaaccagtattcaagcggtaaatgagatcgaagtgattaaaacaacgaatgtgtatgaatgcaaaataaggtttgaacaacatatggaatttttatgaatattactgtaaaaaaataattttttaaaaattttcaataataatactttacaaaaattaaaaaattagtagaataagaattagtaagaatcgtctgataaatatatagagaaaaacagaattatcagaaaattctttaatagctatcgtttagaattagggagggtacagaaaatgaaaaagaaaaaaatgaaaaaactaacagcagttgtagtaccggttttggcaatgagcatggcactaacagcatgttctacatcaggcggagataaaaagacaagcacaaactcaagtggagatagcaagtcagagggaaaattagcggcaaaacaagtgttgaatcgaacagtaaaccaagagattccaacgatggattcttctaaatcaacagatacagtatcttcacaaatgctagggaatacgatggaaggattatatcgtcttgataaagataataaacctattccagctgcagcagaatctagcacgaaaagtgaagatggtaaaaaatatacatttaaactacgtaaagatgcaaaatggtcaaatggagatccagtaacggcgaaagatttcgtatatgcttggcaacgtctattagatccaaaaacagctgctgagtatgcatttatcgcattcccgattaaaaatgcagaagtagtaaataaaggagaaaaacctgtaactgaattaggagtaaaagcagtagatgatcttacgcttgaagttgagttagagcaagcagtaccgtacttcttaaacttagtagcattcccatcatattatccattaaacgaaaagttcgttaaagaaaagggcgagaagttcggtatagagtctgatacaacagtttataatggaccgttcgttcttaaagattggaagcatgaacaaggatggcaattaaagaaaaatgatcaatattgggataaaaagactgtaaaacttgaagaagttaacttcagtgttgttaaagaaccagcaactcttatcaatttatatgatagcggtcaagttgactttgctttattaactggagagttcgtagataaatacagaaataagaaagatgaattcggaacatattcacaagtgagtacgtatttcattcgtatgaaccaaaaacgtgatggacaagatacaccattaaagagtaaaaagttacgtgaagcaattgcactatcagttgataaaaagaatttagcaaacgtaattttaaatgatggatcaaaagaagctgacttcttagtaccaaaaggtttagcaactggaccagacggtaaagacttccaagaaacgtttaaaaatggtttaaaaccaaatgctaaaaaagctgctgcagcttgggaagaagcgaaaaaagagctaggtaaagaccaagttacaattgaattcttaaactacgatactggtaatgcgaaaaaagttggcgaatatattaaagatcagattgagaaaaacttaaaaggtgtaacagttaacattaaacttcaaccatttaagcaaaaactaaaattagaaactgaacaacaatatgatatttcgtatggcggatggaatccggattatgcagatccaatgacgttcttagatatgtttgagactggacattctcataaccaaatgagcttctctgaccctaaatatgacggcatggtgaaaaaagctggaacggaattaatgagcgatgcgaaaaaacgttgggaagagttaggaaaagctgaaaaaacattacttgaagaagatgtagcgattgtacctttatatcaacgaggagattcttatgttttacaaccaaatgtaaagggagtagtaaaacataatatcagtccagaatttagctttaagtgggcatatgtgactgaaaaataatagagttgaaaaagcatttaaaagtggcttagctacttttaaatgctttttttgtgagcttaaaatactaatttttagtgtggttaaatagaggagaataaggtgtatagtatgtacatatagtagatgggggataaatcctactaaattaaaaaaaaccaggatatttaaaaaactatttacaaatacgaaaaaaagagtagaataacattagttataattttctgaaaaataaatctttagtaaggggtctctcaagggttggtaatgtacatataattagggagggtacaaaaatgaagagaaaaaagatgaaaaagttaacggcagttgtagtaccagttttagcgatgagtgttgcattgacagcatgttctgggtcaggtggggaaaagaaaacgactactacatcaaatagtggggaagaaaaaaaatctgatattaaatatgcagcgaaacaagtattaaatcgtacggaaaaccaagaaattccgacgatggatacttctaaatctactgatacattaggttcgcaaattttagggaacacgatggaaggcctatatcgccttgataaagataataagccaattcctgctgcggcagagtctagtacgaaaagtgaagatggtaaaaagtatacgtttaaactgcgaaaagatgcaaaatggtcaaatggtgatcctgtaacagcgaaagatttcgtttttgcgtggaagcgcttacttgataagaatactgcagcagaatatgcatttattgcttactatattaaaaatgcagaagcgattaataaaggagaaaaacctgtaactgaattaggagcgaaggcggtagatgattacacgctagaagtagaattagaaaaaccggtaccgtatttcttaaatttattagcattcccatcatactatccattaaatgaaaaattcgtaaaagaaaaaggtgataagtacggtttagaagcagatacaactgtgtataatggtccattcgttatgtcttcatggaaacatgaacaaggttggcagctgaagaaaaatgataagtactgggataaaaagactgtgaaattagaagaaattaactatagtgtagtaaaagaggttgcaacgaaagtaaacttatatgatacaggatcaattgattttacattactatcaggagagtttgtagataaatataaatcgaacaaagaagaatatggtgagtatgcggaatcaagtacattcttcttacgtttaaatcaaaaacgtaacggacaagatacgcctttaaagagcaaaaaacttcgtgaagcaattgcattatcagttgataaaaaaggattggcaaatgtaattttaaataatggttcaaaagcaacagatcaattggttccaaaaggacttgcgacagggccagatggtaaagattatcaagatacatttaaaaatggtctgaaatataatccgaaaaaaggagcagcagcgtgggaagaagcgaaaaaagaacttggaaaagatcaagttacaattgaattgctaagctatgatgatggaactgcgaaaaagattgctgactatgtaaaagatcaaattgagaaaaatttaaaaggtgtaacgattaatacgaaaattcagccgttcaaacaaaaattaaaattagaaactgcgcaagattatgaaatttcttatgcaggttggagtccagactatgcggatccaatgacatttattgatatgtttgaatcgaagagcccgtacaaccaaatgagttattcaaatccaaaatacgatgaaatggtaggaaaagcaggtaatgaattaatgagtgatgcgaaaaaacgctgggaaacgttagggaaagttgaaaaattattccttgaagaagatgcagggttagttcctttatatcaaacaggaagatcgtatgtaatgaaaccgaatgtaaaaggaattgtgaaacataacatcagtccagaatatagctttaagtgggcgtatgtaactgaggatggcggaaaaaaataaagtgaaagcatttcaaaagtggctgagctgcttttgaaatgctttttagtatgtataagggaataaatctcgttagtctattgagaatcgggtaggtaattaggaaggttctatcggaggaatttagagaggtcagtaagtagtaatacagatgatagtaagagacctcatgctaataagaaaaatatagaacgtagtaatagagtggaataaggggagagatgtttacatatagtagacgggggataattcatatagtagttaaaacaacaagttactataataaaaaaataaatatttagaaaatttacaaaaatactttacaaaatttaaaaaaacagtagaatattaattaataagaattttctgataacgaaagttagtagagaatttctaaatgttaatatcgtacatataattggggagggtacaaaaaaatgaagagaaaaaagatgaaaaaattgacagcggtcgtagcaccagttttagtaatgagtatggcattaacagcttgctctggatcaggagataaagagaaggcaagcacaacaccaaaaagcggtgaaaaagaaggcggaaagctagcggcgaagcaagtgcttaatttaacagagtctcaagagattccatctatggactctgctaaagcgacagaccaagtatcgtttctagctttaaacaacgtaatggaaggtttatatcgacttgataaagataataaagcaacaccaggagttgctgaatcatataaaaagagtgatgatggtaaaaagtatacatttacattaaataaaaatgcaaaatggtcaaatggagaccctgtaacagcgaaggatttcgtgtttgcttggaaacgtgcggtagataaaaatacagcagcggaatatgcatacattatgtttgatttaaagaacgcaaaagcaattaatgatgggaaagcaccacttgatacgttaggtgtaaaagctgtagatgattacacattagaggtagaattagaaaatccagttccttactttgtagaattaacttcattcggaacattctatccgttaaatgaaaaattcgtaaaagaaaaaggtgaaaaatttggtttagaagcagatacaacgttatacaacggaccatttacattaacagactggaaacatgaagaaggatggaaattaaagaaaaatgcacaatattgggataataaaacagttaagttagatgaaatcaactttaacgtagtaaaagatagcggtacacgtgtaaacttatatgaaagcggacaaatcgatcgtgcgggacttacatctgaaatggttgacaaatataaatcaaatccagacttttatacacaaaaaacaccatcaacgttcttcttacgtttaaaccaaaaacgtggtgggcaagatacagtattaaagaacaaagatttacgtttagcgattgcaaaggcatatgataaaaaaggcttaacgaacgttattttaaatgacggatctacaccagcagattacttagtaccaaaagaatttgctaagagtccagatggaaaagacttccgtaaagaaaatggagatattttaaaaacagatgtgaaaaaagcaaaagagcattgggaaaaagcgaaaaaagaacttggaaaagagcaagtaacgattgagctattaaactacgatagcgataatgcgaagaaagtaggagaattcttaaaaggagaacttgagaaaaacttaccagggttaacagtgaacttgaaaaatcaaccgtttaaacaaaaattaaaattagaatcagatttagattatgatttatcttacgctggttggggccctgactacttagatccaatgacattcattgatatgttcgttacaaatggtcctcataaccaaactggatattcaaatccaaaatatgatgaaattgtagaaaaaggtaaaggcgagctattaacgaaaacgaaagaacgttgggatagcttactaaaagctgagaaaatattacttgatgatgctgtaattgcaccattatatcaacgtggtgatgctatcgttcaaagacagaaagtaaaaggtattgttcaccatccggttggtggagactacagctataaatgggcatatattacagaggataagtaagatgaggggcgtacaatacgcccttttttctatgcacttttcttccgtgctcgaatatataaaataaaaaagggagaatcccatgaaacgaaacacatacatcgatttcctagcttattacggaataggaagtgctcatcctggtggctttacgttaacaaaacaattgttagcacaactgccttttaaatatggagcgaatgtccttgagataggttgtggtacggggaaaacagcggcgtatatgacaagggaatttggctataaagtaacaacggttgaaaagaatgaaattatgattcaaaaggcaaaagatagatggttgtttgaagggttagatatacaattaattgaaggaaatgtagagcatttaccgtgtttgaataactcatttgagttcgtacttggagaatcaatcatcgcttttacagacaaagaaagggttatctcggagtgttatcgtgtattacagcaggacggtaagcttgttgtcattgaaatgattattgataggcacattgataagggtgaggaagaaaaaatcgcccaattatatggcatgaaagaactgttaactgagaatgagtgggtacaattatttcagaaagcaaattttaaaagaattacaattgcgggtggtggcacgattgcagaaacaatctctggctatgtagaagagccagaatggaatgtatcctcacatattccgaatgagttatatgaggcgtgggcacagcatgaaaatgtacggcttatgtaccaacacattttagggcatcgtatttttatatgtgaaaaataaagaaaaagagttggctaaaggtagccaactctttactatgttaaatgaaaaataatgcagctaatgtaattccgaagatgaaaccaaatccgagttcaacaccccagccacaaccgccgcctccccagccgccgcaaccacaactactacaaccacgaccaccacatccgcagctgctgaatccaccaccgcatccgaatccacaactatcacacctgctaaggcctccacaaaggtcacaaccaccgtttgcataagcgtcgtagtatccgaaccctgaatcaaaagatgagcgctgttgcaccggttcgatccatacagagttttgtgtcacatcgattattttacctaaatgtatacggccatcacggtcttcaatccgaacaacttttccgaaataacgttggcatgtatcataacatttttgtctatgcatattctttcctccttccgcattacagtaatacgatatgtaagggggacaagtgcggcttgtacgaatgccctatctatcataattgttataggaaaggggaaatataagaagaggatatataaggaggaaaaggcatgaaatctacagatcagtttcagacatacgaagtaccatgggaagattttattgaagcgttacgagaggaaatgaagaagcaagtagggacagatattattgatacagtagtttgcaatttagaagatggttttgaagtgtatacatatgtgcagggggatttagattttgaatataaggaagcgcttgagagaaaatacggaagtgatgcgaagacacctaatgtgttaacgataatgttattagctagtatttataatacaagtgaagagaatatacgcttgcatgcggataataaagagaatccgattgttgaagtgtatgtaaagcaatgaaacacgctgtggaaggcgtgttttttatttgtatgataaaatgttagaaaattgagaaagaaggtgaaggattgggaattaaacatcttaatttaacagttacagatgtaacagcagctagagagtttttagagaagtattttggtctaacttgtagtggaacaagagggaatgcctttgcagttatgcgtgataatgatggatttatactaactttaatgaaaggaaaagaagttcagtatccaagaacatttcacgtaggatttccacaagaaagtgaagaacaagtagataagataaatgaaagattgaaggaagatggatttttggtcgagcctcctaagcatgtccatgcgtatacgttttacgttgaagcacctggtggatttacaatagaagtgatgtgttaagtcaaaaatcaaactttttgttatgtgtttttaaaataaaaagtaggaaaagtctgttttaagtgtggagcttaaacaggcttttttacttatagtatcggatagaaaacgctagaaggaataatattcagttcttataactgtttacataataaaattatgctgggttcgttgtcctaaaatacaagtcatatatcttgtttcctctcataaatttaaacataggaatttgtctacaaaggtggcgaagcctcatcatgaaaatccgaatttgtgccacgttcatgttgtttctatttatatgtttacctttatcagcttttgcaaaaggagaggaggcaaaggaaagggtcgtttcacttgtatatgacgattcgggcagcatgagaaataacgatcgctggaaatatgccaattatgctttgcaaagtttagttgcgctattggatgaaaaagataaattttcttacgttccaatgagtaagccgaatgagccattaaacatttcgttaacgaaggataaaaggcaaacagaaattgagggaattggagcatggaaaacgtatttaaatactccatttagcgcggtagaaacggcgatgcaatctataaaaaaggaagcagatatagatggaaaacgtgaattttggcttattgtattaactgacggggcatttaatgatttagagaaagataaggttggcggaaaagaacaaattttgcagaaattagcccagtttaagaaagaaatggatgcaaaaaagatatcgttacatccagtcttaattacgatggaagaagatttaggacaacaagaaaaagaacaactaaatacgttcaaggaaatatggaagaaagagataaatggtgttacgatgccgtcaagcggagaagatggcattgtaaaaagtgtaaatcaagtggcagcattagttgcaaatcgtgatccattctcctctgttgaatcgattgtaaaaacgaaagtagtggggaaaagagtagagattacaacaccgtttccgttaaagcgtatgacgcttgtacgacaatcgccttctctgcccgattatcaggtcacacaaatttctaaaccattacaattacaatcttctttttccatacatgcaccaggagaagcaaagttgttcggaaatatagttcatataagtacggaaaatgaggaagttattaaaccaggaacttatacgatagaagtggaccgagatattgagaaagaagggttacaagtactagtcgaaccggcacttaattatactgtttctacttatgataaagaggataaggatagaaaaaatgttgaggaaatgtatgaaggtgtgacagctgttattgaagcaaggcctacggagttgccagttcagtcttcttactttcaggcagaagtagaaatagacggaaaacaatatgcaatgaagtggaacgataaaaggcatgtgttttattacgaaacgaagcttggtaaagggttagtacgcgggaaagttcatatgaatataaaggggttttatagacagacgaaagaatttaaaattgaaacagctgagaaaccgaaattatcacttcaaactgttacaaaagattatgaagaaaaagtgacaaatttagagaatagtaaaccgtttattatacaaccacagttagatggtaagccgatgacagaagaggctgtaaagaaactattaaaatctactggtgtcacatctaaacaatcaatcaactatgaaataaagcaacatggaaatcaaatctatgtttatcctcgtccctattactccgacacatttaattttacagataccggcaccgtagaagctaccatcgtaatgcaggattcaaagttacaagaagtaaagaaaaacataacattccatattcaagatgctccgttttatgaaaaatatgcgcttatttttaagtttgtcattcctatcactttattactgttagtagtaggaatcattgttttaggatggattgttcggccaagatttcaccggaaagcactactgtattatgaatgggatcaagaggtagcgaaagattggctatatcaatctgaaccagaattacttcgaaataaatggtggaaccattattttgggatcccatttagagcagaaagaaaaactgtgcaatccgttacatttatagcgaagaaaggttcgaaatctgtctttgtagcgaaagaatcacaagtagttggaatgattattgatggaatgtttataacagaggatgaagtaggaatggaacataagacactatatccaaatgaacttttactaattgatagaggatatggtaaggagatttacaagtacgaatgtgaatagtaggtagggataagaaggggatggagtattcattctctttcccttttttcaaacaagcaagaataggaaggtggttcacatgacattacaagttccaacaatattaattggtttaggtggaatcggtagtactgtgacgcatcaaatatatgaaaaactgcctgaagagcgccgaaaaaaggtagcaatgcacgtatttgatacagatgtgaatacattaagtaaatttgatcatattcgaaagtttaagacacaaacaagttctagtaaaacgcctagggagtatattgcaggagatccaacgatcccagagtggtttccgatggatccgactatacttgataagccattaacagaaggagcaggacagttacgcgttatttcacgtttagcgttacgtgctgcgatgaaagaagataaattgacgtctttttggcaagaaatcgagaaaatttttccggttacaagtgatcaaacggaatatggtgtgcgtgtcattatagtaacatcactagcaggcggaacaggttcagggatgtttctgcaaattgcattatatttacgtgaaatgcttcggaagaaattgcagcatcataacattttaatacgcggtgcgtttttaatgccggatgttttagtaaagacgagaacagttagcgcgaaagaatttgaaacggtgcaagcaaatggctatgcatcgttaaaagaattacatgctattacgctcggttctactggagaattatcaaaacgcggcggtgtaacaattgaattagagtatcgccctgatcaagtagatgaagacggaagaacgaatcatacaattaaacaacatcatttaccgtacaattattgtttcttatacgattatgaaaacctacatggacaccatttacacaatttatcagattatatggaacagatggcaaatacaatttatttacagttatttagcccgatgtccacaagtcattttgcacaagaagacaatcaaattcagcaattagcagaatcaagcggaaaaggacgatattgcggggcaggaacggcaaaactcatttatccgtatgagcatgtgttaaaatattgtgctttaaaatgggctgtgcaaggtttagatgaatcgtggcttcatttagatcaactgtttcaagagaagaagcaaagatatgaccaagatgtaaaacgtgggatgcagcgtgaaaagccggagagaggtaaaagttatttagaggacttggaacatcttgctacccgtccagagcaagctcatattttctatagacaaatgtacaatgaaacacgtgaaggagcagagggtggtaagctcggagttgcgaaatcaaaactgtttttagaagctgtagaaagttatgtacaacgaacggtgcaaaaagatgaggaattaaatcgtctgcaacatgagtgtaaaatttcagctgcgaaactgaaaatgatggaacaaatgaaaggtgaagtggcaagagtggatcatgcggttcgtttatatgcgtatgcgattccgagccgtgtacatgaacatgtaacgacacttttatatgacatgattgaatcagaccgcttttcaccaagtggttctgaagggcagtcctatcaattaaatacatggtttttaaagaaaacagatccagttcacccagtagcagcacgttttatgttatatgaaattcgaaagcagttagtggaaaaaatgaatcgactacatgaaaataatgaacaaaagcgaaatgtaattcaaaactacgataaaaaatttaatgtgggtaatatcgatggaacggtaacggctgtacgccgagtagaaattgctcaacaacaaggctggtttggaaaaatgattaataatcagcaacgtttattcaaaagagaatttgaagacattataacgcaatatgtacacaaattaaatgaatatcgaaaagaaatgctattagaacttgtatatcaatcgctatatcaagcagttaataaaatgattcaatattgggaaagattttttgataatttacatgaaacacgtgaaaatttactgtttgaaatccaaaagcgcagtaaggaatttgaagggaaaacaaacccgacgaatgtatatgtattagctgaagaacagctgcaagaaaagatatggcaagatatgcagcaacatttaaatttaggtgtactaccgaaagatatatcagcggaaatttatatgagtttgtacggggaatattgtcgtgatgcgaaaacagaagagattcagtcgaaaaaggtagaggatttctaccgagaacatatactgagctattgttatgacgaactgcaagtacgctatcgtgataaattagaactgaatatcattgaagcgttgcgaaaagaagcagattataagaaacgtgatcgcgatgaatacgttcgtgaaaaaattgaagacctgttccatttagcgagtccattcgttccgaaagttgctcatcatagggaattacaatattggggtatacatccttctttaaagaaagagctgcaagaggaattaattcaagaaatgtttaaagaaaaagatacagtacatgaagccttttcgccatttgaagtaatctgttatcgagcgcattacggcttatcgctgcaagattttcctaaattatcatcaggacatatttcaaacggatttatgaatgataaaggtgactatttccaatcgtattatcgccgtgtaaataaattaaatagtaaaaaatctagtttaacgccgcatttagataagtattggcacttaccagcctttatgccagatttaaacgcgactcaaacaaaattagattatgataaatgtaatcgtgcattactatacgcatatatgtatcgctggattagtttagttgctgttgatggacaatttgtgtatcaatataacggtgtaggacgtagctttttaattcagtcgatggggaaaaatatttcaagcgaaagttataaattacacagagcattgcttcataatccgtttatttatgaaaacatcttgtcacgatttgaagaagagcaagaaaaggcgatgatacaaggtggacatttatatacacatccgttcgtattaggagcccaagatgtaagatggcttagaaaagaacatgtccacaatcttttagatatgattttaatgtatgaccgtgaagcgaagtatgatccgacattagaagaaacatcagatgaattattaagactattcctcgatgaaatcgagttgtatttccagaactattacggtacaggtgccgatatggtggcaaagaaagagaaagaaatgtttattaaacaattgtgggatcgctcgcatgcaaaaggatatgtagatccaaatagcgctccgtataaaaaatggcaaaatttattaagtgttcaagatgaagaagaaacgccaaaaacgaatgtataatgaatgaaaagggaatccttaaaagtggcaatacaactttagaaaagagggattctgatgccgtttttaggaagtgtatatcaaatatttgggttatatccggaactttattatgggatgatttcagcagagttgcaagaggaagctcagaaggagcatcttgaaaatagtagtgcagaagctgaagtggaagaataaaaaaaagtgcagatgaaaatctgcacttttttgttagtattaaaatggtgacataacctcaaatgaattattatttttgaataataattcatttgaggttattatgattttcattacattgtatgtaatgaaaattgtatgaaaatcaatgtaataaaatgcatatgaatattaaggtggaaaacaacaatgtttttgagaaaataattatgtataaaaataacatttgatacataatcagccgattatttttgagtgatttattattgacaatataattaattgtatgataaattcaatcagcattcttaatggttttttggtatggttaatattttgaaaattcaatacggtataaagagattgatttttctgtttttattgagacgggttactaagtctataggggaagtgaactatgtatatttttatttttaaaatagaacagtaataaagaatgtaacaagtaagagataaacttgaaaaagaggtttcaaagaatgagtcttttcataaagaaagcaatggatgaagaaaagaaaaaagtattgaatcaaactttaggagcgattgatttaactcttttaggtattggagcaattattggtacaggtattttcgtattaactggtattgtagcagcgaaacatgctggtccggcgattgtattatcttttgtattagcggcaattatatgtgcatgtgtagctttctgttatgctgaatttgcatctacagttccagtttcgggaagtgtatattcatatacatatatgacactaggtgagatttttgcatttatagttggctggtgtgttatgctggagtatttattagcgacttctgcggttgcagcaggctggtcagcatattttcagtcattgctactaggttttaatattcacattcctacggtttttgcttcggcaccaggaatggggaagggtggaatcattgatttaccagcagttcttattattttagttgttacatttttattaagccgtggtgcaaaagaaagtgcacgaattaataatataatggttattattaaactggctgttattgtaggatttattgttgtagggacacaatatgtaagaccagagaattggcaaccatttctaccgtttggttttcacggtgtggtagggggcgctgctactgtattttttgcttttttaggatttgatgcagttgcaacagccgcagaggaagtgaagcgtccacaacgtaacgtgccaattgggctacttgtttccttgttcatttgtaccgttctatatgtaggtgtttcattcgtgctaactggaatggttccgtttacggaattaaatgttgctgatccggttgcatatgcgttgcgcactgtaggagaagatagaattgctgggttgttatcggtgggagcgatagcagggctaacaacagttctgttagtagctatgtttgcatttgttcgtgtatcttactcgatgagtcgagatggactgttaccaaaaagactttcaagtgtccataaacgtttacaaactccattttttaatacgtgggttacaggtatactagcagctttattagcgggattagtggatttgaatttattagctaatttagtgaatatgggaacgataacagcatttgtgtttgtatctatagctgtcattgtattaagaaagacacatcctaatatgaagaggccattccgtgcccctctagtaccttttttacctatcgtttcaatagtaagttgtatatatttggcattgaacctttctaagcttactttaattagttttgtggcatggattataataggggttttcatatattttgtatatgctaaaaaacatagtaatgttagaaatagaaataaagtatagtccattgaaataatacttgtaatggaaatgaaaacacgctacttattcatataagaacaagtagcgtgttttttctatttaataatcccattttctaaaattttaatagttggtgccactttcacattagcttttgaaaaggcactcggccaatcaacttcgacttgtttccattctttatattgaaacgctctcgcataatcaccaaatccgaatggatcaagttgctgtttttgaatgttgtggattaaatcgttcaaatctttgtttagttgttttgtaataagagaagttaatttctttctatctttgtctatatccatattgaatgtaagttcagagacagcaattttcaaatccattttaacatgaaatttgaagtggttatcgctataatctgtatggatatcacgatccatgctaagaacatttattgttacgaaatcgccgccatcggtatcttttaaatcactattactttcaactgaagtagaagggattttcaatgtaagcgaaaccggtgtattcgctttcttttgtaacaaaagaagaagggcgctttcataacgatttaatgacattttataaattccgcgagaagttaatagcgcggaaccagtaacgataacatcctttttacctttttttatttctgaaatagcaggtgttatacctttattaaacgtttgcctgtgaaattcatggaatgtcgtaaaaacggtccgattgtacagtttgttcgtattaattaaatctgttaaatactcgggaagggcaggcttatctttaaagttattatatataactgaagaaattggaccgtctactgcaaccatgcgcatgtttccagtgtttttaggatcacgataccaaacatcaaggtaaggcatagccccttcttgttttaaaaaatttgtgctaaataaaatgagctgtaacttttctgtagatactaaaccgccacttgaactattaaacgttgcttttgcttctcgaggtgtacgtactttcgcttcatgtgtttcgtactttttttctacgtcttcattaaaaataggatttacgtggtacacaattaattttccttttgcttttgcatcaaagccgtaaattaatgaaatcgattgtttttctaagtcgagtcgatctccacagcctgttaaaaaggttatgagaaagtaaagtatagtgaaatgaataaagcgcctcatttaaactctgctccttttccaatgctgataaagtgtcatgtataagagaaatacgaccgggaatagaaaaacgataaaataacttgcagttccccaaaattctcgcaacgcacttatttggtaagaggaagggatataaaagaataagatgaagatacacccgaataataaaccataaataggtaatgaactcctttttttgttaagtaattgattgattccatctgaagcagtaaaaatataaggaatgcaagaatcaaaaataataaagagataaaatgacaaaaagataatttcaaatcgctcaagaaatgagaagtgaaatggtgtaacgagagaaagggtaggccataaaaacttagttataccatctgggctaaaataaaggaaagaaacgaacgtcacttgcaggtaaacgaataaagtaatcaaattcgcaagaacaatccctttttttgcagatgatttattactgaggtaaggataaaggacgaatgcaaactcaaatccgagaaaggcaataatagttgattttactgtgttgaaaactggtatccatccctctttaaggagaggaagaagatagatccaatgcccatctttaagtgggataaataatagtaatggcatccagagtgtaaataagacagtaaaaacagcatagcggctaataataagaacacctttatatgcgagcattaccattggaatagataatagcatcatgattaaaaacattggagatctaggcaaaatccaaatgtgaataacgtataagagggaaaaaattaaagaaaccgctgcaagaacagcatataaaatccaaaaaatcattcctactcttcctaaccattttccaagataacgagttagcacatcaagtaaatggtaaccaggatgcttctccatgatttttacaatacatagactgaccctataataatagacatccagccatctgtattcgccccttgggccacttcacgtggcagtgtaagtacaccgaatcctacttgaacaccactaatcgttaaaatgtattgaaataaactaatctccctctttacacgctttgtcacttatcttcctccttttcttctatatccggttgtcgattttcttgttttaagttaagggatagtggtcgtttcttcattagtttccatggcaaacgcacaagaacgtcttttaaatccgtagcaaatgatggagaaaaaggactaccgtaaggaacaccaagtgagtccatagaaagaatatggatgatgataactgacattccaaccataattccaatgactccgaataaagaagcgattatcatcattggaaagcgaagaatccgaactcctgctgacatttccagattgggaatgataaaagaagcgactgcggtaatagatacgacgataaccataacattacttacgattcctgcttgaactgcagcttgtccaataacaatccctcctacgacgccaattgtttgtccgacgggaccgggaagtcgaactgcagcttcgcgtagcatttcaagtactaattccatcaaaagtgcttctaatataggcggaaaaggaattttggctcgagattctccaattgttaacaataatttaagtggaattacttcataatgaaaggaaatcatagcaatataaagagcaggagcaaatattgcaataaatagtccagtgaaacgaaggagtcgtataaaagatggaatcataggtctgaagctgtaatcatctatcgtctgaaaaaaggatgaaaaggtcataggtcctattaatacgcctggtgagcgatctacaataacggcaattcgcccatctagaatatgatgtgttgttgtgtcaggacgttcagttattgataattgcggaaagagagtaaaggaattatcttcaacaaatccctctaattcaccagtagtaagaatcgcatcaacttttactgactcgatacgggatgccatttcttttacgacattttcgttcgcaacatctgctagataaagcaaaaaaacctttgaagtagctcgttcaccaacagtgaattccttcactttcaattcgcgatttggaatatatcgacgaataagtgcaaggctgtcgctcgctacttcattaaatccttcgtgtgagctttttatggagctctctgttgtaggttcttcaatgctcctttttggtgccgcttgcgtatcaagctctaaagcggatagttgcccgtttataaataaaatacttttgccgtgtaaaagagattgttcaatgtctgtccactgttgaacttttttaatatttccgatagaaacagaggcttcccaaaaatcgtcttcattccactctttaaataagagaggacgaagaatgtttacgttaataacagttttgtctacaagtccttccatatatataagtgcagcttcctgtccgttttttaatggaaaagtgcgtgttattaattctggaataccgctaaacagtttggacaagtgctttaaattaagggaaagggaagaagagatagatttatttaatgtgtgattagcttgctcttgggtagaaaaagatttttcaccacgaatccatttattaaaagaccccatttgttcgcttactccttgttatgttttatatggattattatggatagttacaagctgacatatgcgtagtttaaattttatattgtatatttttaactttaacgctataattatagtgttaaagatggaatcgtgatatgacctgttatgaatctatcgttttatttatgaataaatggattggtattttagcaagatgtgctaataaactactccaccatgatgatagcgtgccaaaaatgtggtgcgtatattttcgtggtggagtttttttattctcaaaaagggggaaagaccatgaatgacaacatggttcatattacaattgacggaaaaaagtatacagcggagcctggttcgacgatattgggtgttattaatgagaacgggattgaacatccgcaaatttgttacgtgccagaagtagatcctattcaaacatgtgacacttgtattgtagaagttgacggaaagttaatgcgttcttgttcgacgatagcaacggaaggtatgaacattgaacgtgcttctgttcgcgcaaaagaagcacaaacagaggcgatggatcggttactagaaaatcatttattatactgtacagtatgtgacaacaacaatgggaactgtaaactgcataatacagcagaattaatggaaatcgaacatcaaaaatatccgtatgaaccgaaagtagatgtaagtgaagttgatatgacgcatccgttttatcgctatgatcctaatcaatgtattgcatgcggtcaatgcgttgaggtgtgtcaaaacttacaagtaaatgaaacgttatcgatagactgggaagcggaacgcccacgagttatttgggataaaggagtaaatattaatgattcttcatgcgttagctgtggtcaatgtgtaacgatttgtccttgtaacgctttaatggagaaaacgatgctcggtgaagctggatttatgacgggattaaaaccagatattcttgaaccgatggtagatttaattaaagaagttgagcctgggtatagcggtatttttgcggtatcagaagtggaagcggccatgcgtgatactcgtacgaagaaaacgaaaacagtatgtacattttgtggtgtaggttgttcgtttgaagtgtggacgaaggggcgtaaaatccttaaagtacagccatcttcagatgcaccagttaatgcaatttccacttgtgtaaaagggaaatttggttgggatttcgtaaattctaaagaacgaataacaaaacctttaattcgtaaaaatggaacgtttgttgaatctacatgggaagaagcactgaatgtagttgcaaataaattaggcgctattaaagaagagtacggtaaaggttctattggatttatttcttcctctaaaattacaaatgaagacaattatgtaattcaaaaattagctcgacaagtatttggaacgaataatattgataactgctcacgttattgccaatcaccagcaacggatggtttgttccgtacaattggtatcggcggtgatgccggaacgattaaagatattgcgcaatctggtcttgttattattgtgggatgtaatccgacagaaggtcatcctgttctagctacacgtattaaacgtgcacataaattacacggacaaaagttaattgtagctgatcttcgtaaaaccgaaatggcagagcgatcagatgtctttattagtccaaaacaaggaacagatcaagtatggttaatggctgttacgaaatatatgatcgatcaaggttggcatgatcaggaatttattaatgagaatgtaaacttctttgaagatttcaaagagagcctagaagaatatacacttgaatatgcagaagaagtaacaggtatttcaaaagaaacacttattcaaatggctgaaatgattcgtgatgcagatggtacatgtatcctttggggtatgggggtaacgcaaaatacaggtggttctgatacttccgctgcaatttcaaacttacttcttgcaacagggaactatcgtcgtccaggagcaggtgcatacccacttcgaggtcacaataacgtacaaggtgcttgtgatatgggtactttaccaggatggcttccaggatatcagcacgttactaacgaaatggaacgtgcgaaatttgaaactgcttacggagtgaaaattgatagtgaaccaggtcttaataatattgaaatgcttcacgcaattgacgaaggaaaaatgaaagcaatgtatcttgtcggagaagatatggctcttgtagattctaatgcaaatcatgtacatgaagtgttatctagccttgatttcttcgttgtgcaagatgttttcctttctaaaactgctcaatatgcagatgttgtattaccagcagcgccatctcttgagaaagaaggtactttcacaaatacagagcgccgtgtccaaagattatatcaagttcttcctacgctaggagacgcgaaaccagactggtggatcgtccaggaagttgcgaataaactaggtgcaaactggaattatagccacccaagtgaaatctttgctgaaatggcaagtttatcaccattgttctcgcaagcgaactatgaagtgcttgaaggatggaacagtttccattggggaagttttgatggaacaaatacaccacttctgttccaagatggatttaacttcccagataaaaaagctcgttttgcgattgctgactgggtacgtccagctgaatttccagctgagttcgaccttcacattaacaacggtcgtatgcttgagcatttccatgaagggaatatgacaaataaatcaacaggtattcaaacgaaagtacctggtgttttcgttgaaatctctccagaccttgcaaaagaacgtggcgtaaaaacaggttcgttagttcgtcttgtctctccttttggagcattaaaattacgtgcactcgttacagatcgtgtaaaagcgaatgagttatatttaccgatgaactctacagataacgaaacggcaattaatttcttaacaggtcctgctgtggatgtacgtacgaatacacctgcgtataaacaaacgaaagtgcgtatggaagtgttagaagttgatggcgaaaatccgatgccaaaagcgaacccacgcaataaaaaacgtcaccctcaagctggcattgaggtacatcgtaagtgggcacgtccagggtatgtgcatttaacggataagtaggaggagaaaactatggctgcacctataaaaatgattcaaaaacaagaattaactgaggaagaaataaaacagcaaaaattagatgatttaaaggagcttttaactaataatgaagaagctctaaatcagatgtttaatatagtaggggaattaaatgacattggaatgctagaagctgcaaattctatgctgaaagcgaaagaaccaattgcaaagatcgttctaggtcaagtaactcgtgagcctgttacaaatttaattaataatatgatgggtgctgcaggggcgttaactgaacttgacccagaacttacgaaaaagcttataggtagtttattagtcgggctagaagaaggtaatgaacatctagaaagtaataaaaaagtaggggtattcgatcttatgaaagtattgaaagacccagatattaaccgtgctatcgggtttgggcttcatttcttaaaaggtatggggaaagggttaaaagacgaataaacttcatgaagtgaacctttccgcctaaatatttgtacgaaatagtttgggcggaaggctcattttggtaaaatatataataaagtaaaatgaggcttttgggaggtatgattgtatgtcaaaaaaagtacatgaatttaatgatatgatacgaaaacttcgaaaagaacttttcggaaaaggaccagaacgaattcatactgtttttgcagaaaatatggctatagcgactctttatggaaacttaacacctactgaaaaatttatttcaagtacgatggacggtgcggaaatggttcatatggctagaacgaaaatgattcaagaggtgtatgctgtgaattcacgtgaacatttggaggaacttgttggagcgaaattagtgaatttgttttcagatatgaaagtagaagaagatattgcagtttctgtatttgtttttgataaaaatataacgtgagagaaggatactgatcgtgaaaccgatacaggtagaaagagaaatctttcgttatgaacaaggagcatttaaacatatagaggacagcattgtaacagagtttcctgtcaccattaaaatgaacggacaggagtttgttacaatggttagtactccagaatatatagaagatatggtaataggcttcttagcgtctgaaggaatcattcggaagtatgaagatattgatagtgtatgggtgcaggagaaagaaggatttgtgcatgtaacaacgacaaaagtaaatccgtattatgaacaaatgcaaaataaacgctatattacgtcttgttgtggtatgagtaggcaagggtttgtttttgcaaatgatgcactaagtgcaaaaaaaatgaagggtgtccatgtacaggttgctgcagaggattgttttcggttaatgaaagaaatgcagcaatctgcggatacgtttcatcatactggtggggttcataatgcagctttatgtgatgtgaatggtattattttaagtcgaatggatattggtaggcataatgcattagacaaaatttacggttattgtttaagaaacgatatttctataaaagataaaatcattgtttttagtggtcgtatttcttcggaaatattattgaaagttgcaaaaatcggttgtgaaattatactatcaaaatcagctccaactgagttagctttgcaactagcggaagatttaggtattacgacaataggatttattcgtaatcactccttaaatgtatatacccatccagaacgtgttttaaatataaaataaaagtgaggcaatgaagatgaaatcagttacattagacaagttgcaacgtccgttaaaggatttacgcatttcagttactgatcgctgtaattttcgctgtcgatattgtatgccagaagaaatatttggtcctgattactcgtttttgtctaatgataaaattttatcttttgatgaaattgaaaggataacacgtattttcgtttctttaggtgtgagaaaattacggattacgggcggagaaccgttacttcgaagagggcttccaaagcttattgagcgccttaataaaattgatggtgtagaagatatcggtttaacaaccaatggatcgttacttaaaaagtttgctcctgatttatataaggcgggactatcacgtgtaacagttagcttagattccttagaagaagagcggtttttctatttaaatggtaataggagcaaagtgcaaagggttctggaaggaatacaggctgcagctgaagttggaatgaaaattaaaataaacatggtcgttcaaaagggaaaaaacgaacaggacattttgcagatggcgcaatattttaaggaaaataagcatattcttcgttttattgagtatatggatgttggaaattataatggttgggatttaaaagaggtcgtctctaaacaagaaatagtagatacgattcatcaagttatgccgttagaacggatagaagcaaattattctggtgaagtggctactaggtatcgttatataggaagcgatgaggaaataggtattatttcatcagtaacagattctttttgctcatcatgtacgagagctcgtatttctgcagaaggaaaattatatacttgcttatttgcttctaaaggaaatgatttaagagaattgcttcgttctgaacatacagatgaggacattacagatgtagtacgcgatatatggaataatagggaagatcgttattcagatgaacgcttaaatcatacaaataagaaaacaatacctaaaattgaaatgtcacatatcggtggttaatatataaagctagcttcatagtgaaaaatggaaaatttacaagagttgtggattttctattttatagtaaaagtgatgattgatatctctgtaaaagatgtgcagagaaattaagcagcattcaaaaacctttattttgaggaggttttttgaagctgcttttttatttggagaaaatggaggaatgggtaatggcatttcataagccggaacaaattgctgagcttgtcattgaggccggtgttcaaaaagtaagacagacattgccagcgatgcttattctcggttttttaggaggagcgtttattgcgataggttttttacttaacattcgagttttagggaatttacctgagcgctggggaagtctagtgaatgttttaggaggagcagtatttcctgttggactcatgctcgtagtattagcaggaggagaattaattacgggaaatatgatgtcactgtctatggcgctttatgcaaagaaaattacattgataagcgtactgaataactgggtttggattactctcatgaattttattggggcaattttcgttgcgtattgctttgggcatcttggcggattaacagagggagagtatttaaataaaacggtagcgatagcggaagggaagttacatgaatcatttgggagaactttaattttagcaattggttgtaattggctcgtttgtcttgctctttggctcgcttacgggacgagtgattttgtcggaaaaatcatcggaatttggattccaattatggcatttgtagtgattggatttcagcaagtagtagcaaatatgtttgtcatttccgctgttatttttgctggtcatctaacgtggatggatttggctaaaaattttgttcctgtttttatcggaaatgtaattggaggagctgggtttgttggttttgcttactttgcttgttatcagaaacaacattctaatatgaaatagagttcttgagaggaagggtatgtaatggctgatcggtattcacgacaacagttgttcaaaccaattgggagtaaaggacaagaaaaaattcgaaataaacatgtgttaattgtaggggcaggcgcattaggaagtgcaagtgccgaaagtttcgtacgtgcaggtgttggcaagttgacgattattgatcgtgactacgttgaatggagtaatttacaaaggcaacaattgtactctgaacaaaatgcgagagagaaaatgccgaaagcaattgctgcaaaaaatcggctagaacaaattaattcggaagtacaaatacatgctttcgtaatggatgcaacttcagaaaatatggaaggtctattaaaaaatgtagatgtaatcattgatgcaacagataattttgatattcgatttgtaataaatgatttatcacaaaaacataatattccgtgggtatatggttcttgcgttggatcgtatggtatgagttatacaattattccacaagagacaccgtgtttacattgtatgcttaaaaatattcctgttacaggtgtgacatgtgataccgctggaattattagccctactgttcaaatcgtcgcagcatatcaagtggcagaagcactcaaaattttagtggaagatttctcagcaattagaaaaacatttttcatgtttgatatatggagtaatcaaaatcattttataaaattagggaaaataaaaacagacgcttgtctctcatgcggttcaaatcgaacttatccttatttattatacgaaaatcaaacgaaagcagctgttttatgcggaagaaatacagttcaaattagaacagtagacaataggaaatacaattttgatgatatagaaaaagtattacaaaaactggggaaagtagatcggaatccgtatttactatcttgccaattcgatgattaccgcgtggttgtttttcgagatggtcgtgtttttattcatggtacaaatgatatttcgaaagcgaaacaactatattatcgcgtattcggttaatagagagggtgtcaacaatggaaagaagagtgccaattacggttgaagaagctgttcgtaaagtgatgggatttgctgataaaggcttaaaggagctattaccaattgaattagcttatggacgtatattagcagaggatttagtagctgaccatgatgtaccgtcatttaatcgttcgccatatgacggatttgctattcgagcagaagatactaatttagcaagttatgaaacgccaattgtatttgaagtagtgggtgaaattggtgcaggatcgctattccatgagaaagtagctccgtttcaagcagttcgaattatgacgggagcacaaattccgaatgggtgtgatgcggttgttatgttagagctgactcgtcaatatgagaagaatggcaacaattatatggaagtgaagcgatcattcaaaaagggcgacaatatttcttttcaaggtgaagatgctcgtaaaggaacggttcttgcaaagaaaggatcgtacattaatccaggtatttcagctcttcttgctacattcggttatagtgaagtaccagttgcgagaaagcctgtaattggactgttagcgactgggagtgaattactggatgtcaatgattcattacagccagggaaaatccgaaacagtaatacgtacatgatattgtctcaaattcgaagagcgggcggaagagtaaaatattttgggaagtttagtgatgattttaatacgtgttttacagctgtgaaagaagcgcttggccaagtagatatgttaattacaacgggcggtgtatcagtaggagattatgattatttaccagctatttacgaaaagttaggtgcatctgttctttttaataaagttgcaatgcgaccaggaagtgttacgactgtagcacaattaaatggcaagttattatttggtttatcaggaaatccatcagcttgttacgtagggtttgaattattcgtaagaccgtgtattcggacgtatatgtttagtgaaaaagtacatttaaaaagagaaaaagcgttattaggagaagattttctaaaaccgaatccatttacaagatttgtacgagcaaaattgcaatatgatgaggggaaattaatcgcttatccatcagggtttgataaatctagctcagtttcttcattggcaaaatccaacgcgtttatcgtattgccgggcgggacaagaggatataaaaaagatatgtttgtcgatgttcttttattagaagataacgaaggtagtgaatggccttggacatttcataaagtgagaggtggttttaatggaacaagtgctatttgagattgtagataatccgattttagttgaagaagtaacgaataaagtcgcaagaagagaagcaggtgcgattacaacatttattggtacggtgagagaattaacaaaaggaaaacgaacgctacatttagagtatgaagcatataaaccgatggcagtaaaacaacttatgagaattggagaagaaatttgtgaaagatggccggatacaaaagtagcaattacgcaccgtgtagggcggctagaaataatggatattgcggtagtcattgcagtttcatcaccgcatcgtaaagtagcttatgaagcgaatgagtacgcgattgaacgtataaaacgaattgttccaatttggaaaaaagaattttgggaagatggaacgatgtggattggagatcaacttgaaaatacaccatatccagaaggaaaaccaaagaaggaagaatgagaaaatgattataattttattgtttgcaaatttgcgtgaggaagttggatcggatcgattagtgatttcagaaaagcaagaaatgacagtgcaacaattaaaagaatggcttaaagccagctattgtttacaatcgttggataaagtgatggtcgctgttaacgaagagtttgtaatgaatgaagagatgataaaagctggagatatagtcgcattaatcccgcctgttagcggtggatgataagttttttcaccagatgaagcgccaagaaaatgttgtatataaattagaataagagaagggatgagttctatgcttactcaagaacaaataatgaatgcattaaaacatgtagaggatccagagttacacaaaagtgttgtagaattaaatatggttagaaatatacaaatgaacggaacaaaggttaaacttgaagtagtactaacaatccaaggttgtccgttaaaagcaaaaattcagcaagatattgaagaatcacttcacgcaattggtgcctctaaagtggaggtaacatttggttctatgacacaagaagaacgtacagctttaacagagaaattaaagaaaaatactagaacagaaactggtatgccgagcatgcttcgcccggattcaggagtacgttttattactgtaacgagtggaaaaggcggagttggaaaatcaacggtgacaattaatcttgcaactgcactagcgcgtatgggcaaaaaagtggggatactagatgcagatatatatggttttagtattccagctatgatggaaacgaataagaaaccaacgatgattgatcaaacggcaattccagtcattagtcacggtgttaaaatcatgtcgatgggattttttacagaaggaaataacccagttatgtggcgcggaccgatgctaaataaatggattcaaaattttcttgcgaatacgcactggggagaattagattatttattacttgatttaccaccaggtacaggagatgttgcgatcgatgttgcagcgatgattccgcaagcgaaagaaataattgttacaactccgcacaatgtagcttcattcgttgcttcaagagtcggtgtaatggcaaaacatacgaagcatgagattttaggtattgtggaaaatatggcttattatgaagaacaagatggatcgaaaaattatctcttcggaaaaggcggcggcgaaatgcttgcagaacaattgcaaacagaagtaattgctcaaataccttttgcgaaacgtgaagaaaataatggttcatctgtatatgatgaagattctcttgttggagaagtgtttacatcgttagctgaggatattatttatagaggatagagggggaagtttagtatggcatgtaacattgatcattctattgaagatgtgatgaataagcttgaaagtcaaaagagttttttatcagaagagatttttaaagggttaaaaaattttttacaaggtaatcactcacaagaaatattaaatgatgtatttcatcttttaaaaaagtatgacttagtaagtgaagaagaaagagagacgagaaataatcaattattgttgattataaaataagtatactttggcttttgttttgtaacaggaggggtaaatggaatggatatgaaaaagatgattgaaatgatagaagcaacaaaagtgactaaagaagaattatcaatttctactttacatcaagagcttgtgaagttatatagtcaaaaaaatgttgctcattataccgagttattaaagtatattttatcattatccgtgcagctcaacctacatcttgtattgaaatattttggcgtgcgaccggttgttgcgacagatgagcgtatgcaatttcaagagatatttaaatgcttagctaagaaagatgagaatggggaatggtttctaaattttgtttctttatatgtagggctaattgtagttcttcgttttgatgagaaagtgattgagagcaatttttttgatgatatggtagtggatgaatgtaatgaaatataggattctgctcataacatttttctatattaaatgctttaactgcgattttagttggttatgtaaatatgaaggtaactaattaagaaaaaggaatgaaactagttggataaaaagagttcttcagttgtttccgtcgttttttcgtgttaccattaagcgaatttttcataaggagagaaagcgatgaaatggatttattttcttattattaacattatagcttttagccttatggggcttgataaacgaaaagcgaagaagaaacagtggagaacgccagaaagtacgttgtttttatcagcggcagttgggggagcagttggaacttggattggcatgtatatgtttcatcataaaactcataaaaagaaatttgttttcggcataccgttacttgttgtaataacggtatgtttattattcgttgtatgagaaatgtcgaaagaaatgcagattgattattggtaaagtgagcatgtgagaccgtataatggagaaaaaatgagaagaggagaaaaaggaagatggggagtcaatcagcagagcaaaaaaaagggatactatatgcggctggtgcttacacgatgtggggaatcctaccgatttattggaaatgggttgaggaagttccagcagatgaaatattagcacaccgcatcgtttgggcgtttgtttttatgttactcgtattaggtgttacgaagaggtttcgccagtttattggggaatttgtgaatctttttaaacgacctaaattattaatgtcattaacaatagcttcagtcttgattagtggaaactggtttgtttacatatgggccgttaatcataatcatgttattgaagcgagtcttggctattatattaatccgcttattagtattttacttggtacagtcgttttaaaggaaaagttaaacttctggcaatatgttgcagttggtttagctggagtgggggttatcattttaacagtacgtttcggggctatcccgtgggtttctttatcacttgccctttcatttggattatacggattaacgaaaaaattgttaaactatgatgcgacaattggacttacgatggaaacgatgttagtaacgccgtttgcgattatttatctagtaatgacaggagtacatggtttcggctcatttggctctatctcaatgttatcgacattactattaataggagcgggtattgttacagctctaccacttttttattttgcaaaaggagcccaacttattccgctttatatggtaggttttttacaatatattgcaccaacaattagcttaattttaggtgtattcgtatttggtgaacatttcacatctactcatatgattgcatttttctgtatatgggttgcattatttgtattctcggtagcgaagactaagtttttagtgcagaaacaaccgaaatttataaaaaataaatcagcaaaagtatcataatgcgtagtattttctacgcatttttctttatactgatactatataggatttccattatagctagtaaggagctgagaacatggaaacaattttacataatgatccgcttatggcagctgtaatttcatggtttttagcacaattaacgaaagtagtctttaaattagttaaaacaggtgaatttgattttgcaaagttttttgcttcaggtgggatgccaagttctcatgcttcaacagttacagcgcttgctacaggagttggagtagtggaaggtgtggaaagctcgatgtttgcggttgctactatttttgccattattgttatgtatgatgcttcaggagtaaggcttgcagtaagtaaacaagcaaaaatattgaatgacttttttcacggtagagaaacagaatataagaagttaaatgaacttgttgggcatacaccgtatgaagtagtagtcggtgctttattaggaattattgtcggagtagggtattgtttatgagcagaacattttatatgttctgcttttctttgtttttatacatattcagctacctttttgaatatcgttatacggatttcgaaagggtgggtgagtaacttgttattatatgaaaaagtgtatgaagaaatagcgagaagaacaactgcacttcaaacaatgcaacggcaagatggtacgtggcggttttgttttgagggagcgccattaacagattgtcatatgatttttttattaaaattattaggtagagataaagagatagaaccgtttgtaaaaagattagcatcactccaaacaaatgaaggaacatggaaattgtatgaagatgaggtgggtggtaatttatctgctacaattcaatcttatgctgccttacttgcatcggaaaaatatacaaaagaagatgcgaatatgaagcgagcggaaatgtttataaatgagcgcggtggggtagcgcgtgctcattttatgacgaagtttttattagcgattcatggagaatatgaatatccttctctctttcatttgccaacaccaattatgtttctgcagaatgattcccctctcagtatatttgaactgagtagctcagcacgtattcatttaattccgatgatgttgtgtttaaataaaagatttcgagtagggaaaaagttattgccaaatttaaatcacattgcaggcgggggcggagaatggtttcgggaggatcggtctccagtttttcaaacgttagtaagtgacgtgaagaaaattataacgtatccactttctttgcatcataaaggatatgaggaagtagaacgttttatgaaagggcgtattgatgaaaatggaacattatatagctacgcaactgcctcgttttatatgatttatgctttacttgcattaggacattctattcaatcaccaattattgagaaggctataatgggaattacatcttatatatggaagatggagagagggagccatttgcaaaactctccgtcaactatatgggatacagctttactcagttatgctttgcaagaagctcaagttccgaaagtaagtaaagtgattcaaaatgcatcagcgtatttactaagaaaacagcaaacgaagaaagtagattggagtgtacatgcaccggatctcttcccaggtggttggggcttttcggatgtgaatacgacgattccagatattgatgatacaactgctgtgttaagagcgttggcgcgaagtagagggaacgaaaatgtagataatgcttggaagcgagcggttaattgggttaaaggattgcaaaataatgatggtggttggggagcttttgaaaaaggggtaacgagccgtatattagcaaatttaccaatcgagaatgcaagtgatatgattacagatccttctacaccagatattacaggaagagtgctagaattttttgggacgtatacgcaaaatgaattgcccgagaaacaaaaacaaagtgcgataaattggttaatgaatgtacaggaagaaaatggatcgtggtatgggaaatggggaatttgttatatatatggtacgtgggcagtgttgactggtttacggtcactaggaataccatctagcgattcatcattgaaacgagccgttttatggcttgaacatatacagcatgaagatggtggctggggagaatcttgccaaagtagtgtggaaaaaagatttgttactttgccatttagtacaccatcccaaacagcatgggcgttagatgccctcatttcttactatgataaagaaacgccagttattcgaaaaggtatttcatatttgctctccaacccttatataaatgaaaaatatcctactggaacaggtttaccaggtgggttttatattcgttatcatagttatgctcatatatatccgttgcttactttggctcattatgcaaaaaaatatagaaaataaaccgagagatgtctctcggtttattttgttgggtagtaggtcccttttgaaaagaataaggttgtgatgtaccttatttttcggttgattggcgcttttgacgtgcatcagcggcatttgcacgtgcgtttgcttctaagtcattgtggtcagcgagttcgcgagagaactcaacatcaatgccatcagttgttttgctttgtttgaaattttttttattcattcgacacaatctccttgcaatttatcccgcataacgggtagtaaaactcccaccttaaaactcagatggaacaaagaagctaggtgggagattaaatgcccgattggtgagggctgataatcagtgggggatgaacaaacttcccactaattaaagtttcactttatgcgacgttgcaaagttagtttgacacaaatagacttttttatacaaagaggagttggaaagtaaaaagccgaaatatacagtataagtaatagaaatgggggataggaatggagtttttaaatgggaaaacagctgttgtaacaggagctgcacagggaattggaaaagagattgcaagggtttatgcaaagctaggggcgaaagtattaattagcgatgtaaatgaagagacgctacaaaaaacgacacgtgagttatcagatgaaggatatgaagtgtgctcatatcgatgtgatgtgagtaatcaaaatgaagcaaagtcgttaattgaatatgcggttcaaaaatttggtacattacatattttggtgaataatgctggaattacaagagacgcaatgttacataaaatggagaaatctgcttgggaacaagtattacaagtgaatttaactggagttttttattgtatgcaaccagcgcttctttatatgagacaacaaggatatggaagaattattaatatttcttctataagtagagaggggaatattggacaggcaaattatgctgcaacgaaagctggagttgtaggattaacgaaaacagcagcgaaagaagttggaagtttcggtattacttgtaatgcgatttgtccggggtttatggatacagatatgaccaaaacgataccagataaagtgaaagaaaagatggttggcgctattccagttggtagaattggaacgccagaagatattgcgaacgcagcagcctttttagcatcagaatacgcatcttatattacaggtgaagtattaaatgtgagcggaggactgcaaatttaaaggaatacataatgaaaagaacctgaccggataggtcaggttcttttcattaatttaagttaagccaaacgctctttacttctgtatagttatttaatgcataagatcccatttcacggccaagaccagattgtttaaatcctccaaatggagatgctgcatcaaaaacgttataacagtttacccacactgtacctgcacgtactttgcttgcaacatagtgtgctgttttaacattttctgtccatacaccagccgctaagccgaattgtgatttatttgcacgttcaattacttcatcaatatcgttaaatggtattgcagaaataactggaccgaaaatttcttcttttgcgatcgtcatttcatcatttacgtcagcgaatactgtaggagaaacgaagtagccttgatcgaatggattacttcctccgcaaagtacttcagcgccttcttcaatccctttttcaatgtagcccattacacgtttttgttgttcttcagaaacgagaggaccaattgttgtttcagggttaagaccgacaccttgatttagttttttagaatagaggacgagatcagccatgacattatcatacattttcttcggaacaaataagcgtgatccagcagagcatacttgtccttggttaaacataacaccagaaagtgcaccaggaatcgcgcgagataaatcagcatccggcaagatgatatttggtgatttaccgcctaactcaagtgtaacgcgttttaatgattcggatgcttgtcgcataatttgtttaccgacaggagtagaaccggtaaatgcaattttatcaacgagtggatgattaacgagagcttgtccagctgattcaccgaatccaggtacgatattaataacacctttcgggaatccagcttcttcaattaattcagctaagtatagagcagatagtggagtttgttctgcaggttttaaaacgattgtacatcctgtagcaagcgctgctcccattttccacattgccataagaagcgggaagttccaaggaataatttgaccaacgacaccaacagcttcatggcgtgtatagttaaagtaatcaccggaaacaggaattgtttgaccaacgattttcgtagcccagccagcgtaatagcgcatatgctcaattgcaagtgggatgtctgctgccattgtttcacggattggctttccgttatctaatgtttcgagctgtgcgagctcttctttatgttcttccattaaatcagctaacttgtacatgagacggcttcgctcagcagtgctcatacgagaccaaggaccttcgtcaaaagccatacgagctgcgactacagctttatgaatatcttcgcgaccagcttcagaaacgacggcaagtgtttcaccagttgctgggttaggtgttttaaatgttttaccggaagcgctttcaatgaaagatccattcacatataacttttttgtaccttgaagaaacttctctaccttttcatgaagatttacagctagttgactcattgtataacccccttgaaaatataatgtaaacgcagtacgagacggcgcttattccgaaatcaaggatgtggaaactagatggaaagcctctaattaaaatcataattaagaaatactgaaaattcaaatttcattcgtgttacaattgtaaaaaatatgtaatgtaagagaatcttctatatgattataaaaaaatcctgcttgtttttgctttctagtaggaaaaactagaagaacaatggtacaataatacatcgtgagaggaggggtaaaaatgaaagattatcatgatgatccacgctttcgaatagcccatagagaagcgttaattggtcttggacttgctattattaattttataatttggtacggatttgcttatgggcttggtagtaaaaatccgaatgaatatacatatgtattaggttttcccgcatggtttttttatagctgtatcgttggatttatcgttatggttattttacttagtttagttgttcgttttgtatttcaagatatttcactcgatgaggaagaaaaaagtgaggaataatagatgaattggtatgtaatcattccaatgataatttcgtttatcgttgtatttttaattggtgtatatgcttcaagacgcgtgcaagcaactgctcataataaatttttgcaagaatattttcttggtgggcgtgagctaggcggtttattattagcgatgacaatgattgctacgtacggtagtgcaagtagctttattggtggccctggtattgcttacaatatgggtcttggatgggtactgttatctgcgattcaagttgtaacagggtatatcgttttaacggttatcggtaaaaagtttgcaattatcgctaggaagatggaagcaattactcttatcgattatttaaaagggagatacaataataaagcagttgttatactttctgcgttatgtattattatctttttattttcagcgacagtagcccagtgggtcggtggtggacgattaatcgagtcactaacggggctatcgtatacaacagcactatttttatttactttttctgtacttgtgtacgtattaattggtggatttcgtgcagttgctctatcagatacattattaggaatcattatgttagttggaacaacaatcattttaattgctactgtcattgctggtggtggaattgaaaagattatgcaggaacttgttcaaattaatccaaagttaattacaccattcggagcagatggcagtttaacgaaatcatatgttacatcattttggattttaattggaattggcgttgtcggtttaccgcaaattagcgtgcgtgccatgtcttataaaaattcaaaagcgatgcaccaagctttaataattggaaccgttgtcgttggcacaattatgatcggtatgcatttaacaggtgtatttgcaagagtagtacttccaggtataacggtaccagataaagtaatgccgctacttgcgatggaagtgttgccaccttggttagctggagttttcttagctgcaccgatggcagcgattatgtctacagtaaactctttattattacttgtaagctcgtcaattattaaagatatatacgtaaattacataaataaagatgcagcagacagtacgataaaaaaaggaagtttgtggattacgggtattgtaggactactcgtttatgcagcggcaattaaaccaccagattttttaatatggctaaatttattttctttcggtggattagaagcagcattcatttggccaatcgtattagggttatattggaggaaaggaaatgctacaggagcgcttgcgtctattttagttggggtaggctcatatatgtgtattcatcttttctatccaaatccgttcggtatacatacagttgtcttcccgatttgttttgcgtttatcgcttacatcattggaagtatgagtgctgtaaaaaaaacagtataggttagctgaagaaacgtagtccttataagactgcgtttttttgtgtgaatttgttcattttttattctgtatatccacggttattcataaattaataacaactgaggggatggagttgaggtcgatgaaaaaagtattatttttaggagacccaggcattgatgactctttagcaattatgtatggattgttgcatcctgatattgatattgttggtgtagtaacgggatatggaaatgtaacacaagaaaaggcgacaagtaatgccgcatatttattgcaaatggcaggacgggaagatatacctgttattaatggtgcgaaaattcctttatccggagatattacgacgtattatccagaaattcatgggacagacggtttagggccaattaaacctccaaaaactttttcaccaaatataaagcctttttgtacattttttgatcttcttgaaaaatataaaggagaattaataatagtcgatgctggtagatcaacaacattagcgacagcatttattttagaaaagccgatgatgaagtatgtgaaagaatattatataatgggcggtgctttcttaatgcctggcaatgtaacaccagtcgcagaggcgaattttcatggtgatcccattgcgtcacaattagttatgcaaaatgccaaaaatgtaacattagtgccacttaacgttacatctgaagcaattattacaccggaaatggtaaaatatattacgaaacactctaaaacgagttttaataagttaatcgagccgatatttacgtactattataaagcttatagaaagttaaatccgaaaataaaaggaagtccagtacatgacgtcgttacaatgatggttgcggcaaatccatcccttttagattatgtatatcgtcgtgtcgatgtagatacagttggaattgcaaaaggagagagtattgctgattttcggcctcaacctgatgcaaaagcattaaaaaattgggtgcgaattggttggtcgttacattataaaaagtttcttgaggattttgtgaaatttatgacgtagacataataggagcatacaagttaaaataatggagatggttatttaaatgaccatctccattattttgtttttaaatgataaatagagaagagttacacaataggagaggaattttacttgaaaaaaactatagtatgcgcagtaattgtgggtatttttgttttgctaatatcgggtaactttttagtgaaaaaagtgtggagttcaaataatgatgatgcacagtatattgcatcttttattgaagaacataaagatgaaaaaaatagtgcgcttctagtaaagagaaatgataaagttgtttattctgtaaacccaaatgttgtattgccagttgctagtacgatgaaattaattgtggcgcttgaatatacgaaacaagttactgaagggaaaattgattcttctagtttcgtgtcgattaatgatgtgaatcgttattatgtgccgaatacagatggtggtgcacaagatagatggcaaaagtatttggagaagacgggcaagataactgaaggagcggtttctttagaagaagtggcaaaaggaatggttaagtttagttcgaatgcaaatgctgaatacttaatggaattgttaggattagataacatcaatcgaaatttacaaagtttatcacttcctgcacatcaaccactatttccaatcgtttcatctttgtatatcccgggatatttgcataaagaattacatgttccaaaatataaaatagagaaaaagttaaaagaaatgtctcaagagcaatatcgtgaatatgcgatgattattcatgaacgcttaaagaagaagggaccattattacagaaggaaattccgctttatttagaggaacgttacgacaaaatttggtcagatagattaccagcagcttctgcaaatgattatatggtattacttcaaaaggcaaaccataaaggtggcttgacagaggctgaagaaaaagtgtgggcaaatatcgttgaaacagacatgagtgccaagaaataccgtaaaacattcagacatgcggggcaaaagaatggttacacaccatggacggttacaaaagcagtttatgctatggataaacgtggaaactgtacagaaattgtgtttttggcgaataatttaaatgaagacgatagtgcagaaatacggaaacatttagcaaacttgcatttccaagtgttgcaaagtgataagtatgatgcgacttttattaaataaactcggtgcagagagcaccgagtttatttttatgtacaagcactttttttctatctctgggtatgatgggtagtaatacttaggtgagaggggaaaaggtgatgaaacaaagtaaagaagagtttataaagagtgaaggcgctgatttccctgggaaaacatatgtggattgtgtattacaacatgtatttgattttcaacgaaattacttattgaaagatatgtttcaagtgcataaagcacatattacgatgctgacggaagaaaatttaatgaaaaaggaagaagctaaagttatattacacgcattaaaaaaggtagagggaattccagaagagcaattgctctatacagagcagcatgaagatctcttttttttagtcgaacatttaatttctcaagaagcgaaatgcgattttgtaagtaatatgcatattggtagaagtagaaatgatatgggcgtaacgatgtatcgcatgagtttaaggcgatatgtattacgattaatagaacatcatttgttattgcaagaaagtgtactgcaacttgctgctgatcataaggaaacgatcatgccagcttatacacatacacaaccagcacagccaacaacatttggtcattatacgttagcaatttatgatacgatgcaaagagatttagaacgaatgaaaaaaacgtaccagcttttaaatcagtctccaatgggggcggctgcactctctacaacaagtttcccgattaaacgagaacgagttgctcatctacttggatttacaaatgtaattgagaactcatatgatgctgttgctggagcggattatttattagaagttagctcgctacttatggtaatgatgacgaatacgagtagatggattcatgactttttgttgttagcaacgaaagaatatgacggtattactgttgcaaagtcatatgtacaaatcagtagtattatgccgcaaaaacgaaacccggtttcaattgaacatgctcgtgcaattacgagtagtgctttaggagaagcatttacagtatttcaaatgattcataatacaccatttggtgatattgtcgatacggaagatgacttgcagccatatttatataaagggattgaaaaggcaattcgtgttttttgtatgatgaatgcagtgatccgaacgatgaaagtagaagaagaaacgttaaaaagtcgttcctataaacatgcaataacgataacggatttcgccgatgttttaacaaaaaactatgaaattccatttcggcatgctcatcatgcagcaagtgctattgcaaatatgtcattggagcagaaaaaagaactacatgaattacacttcaaagaggtaaatatgtacttgcaagaacattttaaaataaatttattagaaaaagagtggaaagaaattatatcgccagaagcttttattcaaaaaagaaatgtatacggtggaccgagtaaaaaagagatggagcgcatgatcaaaaatcgaaaagagtcatttcaaaaagaagaagatgtatttgaaaaggaaaaacagagaattttacaagctgaaaatgctttgaatacattagctttgaatattattgaatcgtaaaagagggatttgatgaattaatcgccaatacttaattaaactatgaatagagagaagagattgtcgatgattcaattacatgtatatgaagagatttttcattttaaagaagatgttacaccatttctagaaaagaatgagcaggaaaacaatctcatattaggtgtattacaaatggtccaagaaccgatatttatggggatagcgaaacaaggagaagaaattgcggttgtatttctgcaaacagaagagaagaaacaaatcattgttgcaacttctgaaattgcgggagtaactattgaggaacttgcaaaagaattaacgaaagtatatccggatattcctggattgatcggtaataagaaaattgtacagaaattagcggaagagattgccgtattagaaaataaaaaaacgaatgttgcaatggagcaaggtgtgtatgagctgaacagagtaaagaagaagtgtaatgcgaatggacttttccgagcggtaaataatgatgaattaccattaatagaacagtggatatatcaattttgtgaagacgtaaagcttcctactacgaaagaagaagcaaaacaaactgcgtatacattaataactacaaatcgactgtttggtttggaagtggatgggaaactcgtttctgtagctgcaaaaacgagaccaactaaaaataatataacagtcaatttcgtatatacgccgaaagaagcaaggaaaaaagggtatgcatctcattgtgtagcagcacttagtcaacgtatgttagatgaaggctaccagacgactacgttatatactgatctagcgaatccgacatctaataaaatttatcaagaaattggttatgaacaaattgcggaatctgtgctcatatttttagagaagtaaaacaaaaaggcgtgctattttagcacgcctttttgttattcatcaattctaataacctcgccttgagggaattcctcagtttctagtaagttacgaatagctttcgcaacatattcaggtgataatagctttccttcttcttttaatgcaatgaagcggtctaaatttgtgaagtcttctttagctgtttcacgaatttgtgcttgcatatttgtatcaacaacaccgggggcaaaagcgacgatttttactggatattctttttcccattcttcagttgctacgcattgtgtaaacatatttacaccagctttcgtcgtacaataagcgccccatccgaaataaggattttttcctgcaccagatgaaatatttataacgcgtttatctactttccattctttcgtatgtttcataaacgtagatgtaagaatcataggtgcaagtaaattaatgtgaacgttcgtaatgaattgttcactttctgctttttcaatcggcttcataggtgcaactgtacctgcattattaattaaatgaatagaggatacattgtcttctttaatggatgaaatgatttctttaaagttagtttctaagttatgtacatcttgaagatctaaggaatgaaaaatgcaattgctgttatattgctctgcaagtttagtaagttctttattttctcttctagaaatagagatgacagttgtactttcttctaacaactgagtggcaatagcctcacctaaaccttgtgaagttcctgttatgataacgtagcgcatagttttataaactcctctcgtatgtgcggaattttgttggacaacgtacattgcatagtttgtctacattttatagtatagagcactttttactataaatgaaatgagatgattgtgtgccttttataaaccgttttacaacaacagtacctggtgccgtcacgttcactgggaacacgttagggcttagccctacatcacctgcgccaggtaatatttttggtacacttgctgtatttactacggtaaatacagcgctgcaagtaccagggttcccagcaggaacgacggatgaatggcaattgaattcttcaagtgcaattttaaatcttccggcggggagtagtgtactatatgcagagttagtttgggctggtacttttcggactgatacggaagatgttttaccatttttaaatgatgatattacatttacaacaccatcagggacgtttgctgttacgccagatcccgctaccgcgcagcaaggttcagtaggaaatcagttttattatgctcgctctgctaatgtaaccaatcttgttagtgcaggtggggcaggcacatatacaacaggtgctgtgcccgctgcaagaacttcagctgatccaacaatcagtcgttcagctggctggacgcttgaggttgtatatcaaaatgcaagtttacctcttcggaatttgtcagtttatgcaggccaagaaattattgatgcttcatccccgcctgttgatgctactatttcaggatttgctactccagctacaggagctgttacaggaagagtactcgtaactgttcaagagggagattccaacatttctggagatcaacttcgctttggaccaaacccaaatgctacagttgcattattcggaccgagaaatccggcaaataatttctttcaatctcaaatttgtaatgactttggggaattagatacaaccggaacgtttggagatttgaatcagccattagggatagctttggctgttcgaagacaaggatgggatattacaaacgtagatgcttcatcatcattagtaaataatcaaacgtcagcaaccgttcggttcgttacaaatggtgatggttatgcagcggctggttttggtgttcaaattgatgcgacgggaccgattataaatcctgtcaaatctgttgataaagcagttgcaggtataggagatattctcacttatacgattacagttccgaatacaggaacaggaagtgcggacaacgttttattacaagatagtattccgaacggcacagcatttatagctggtagtgtaacggttggtggagtaacacaaccaagtgcgaatccagctagtggaattaatttaggaacgataccaaataatgctcaaagaatcgttacattccaagtaagaattacatcgtttccaaatccaaaccctatttcaaatcgtgcaatggtgtcttaccaatttcgtcctttcgttggtagccttcctattgcaagtacgtcttcttcaaatacagtacaaacgacagtgaatcaagcaactataagtatgcaaaagtctgtagatctacagacggcaacacttaatgatgtattaacgtacacggttaatgtaacgaataatggaaacatcactgcaaacaatgttatttttgttgatagtatccctgctggaacaacatttgtcgcaaatagcgttacggtaaacggggtagcacgtccaggagcgaatccagcaagtagtattaatcttggaagtattaatgcatcgcaaacgactgtagtgcgctttcaagttcgagtgacatcaaaccctcttgtcaatccaattccaaaccgtgcgagtgtaacatttaactttactccagtacctggtcaaccaccagtttcagggcaagcgacaagcaatactgtagttacgacaattaatatagctgatataacaacgagaaaaacagtggataaagcttttgcaacggttaacgacgttcttacgtacacggtaacaattcaaaatacaggaaatgtacttgcgacgaatgttatttttcaagatccaatcccaactggaacgacttttatcacaaatagtgtaactgtagatggaatttcgcaacctggggcaaatccggcaactggctttacagttgctaacatatctccaggtgggactaggacagttacatttcaagtacgagtaacttctacgccatcaggaggtacgattccgaatcgcggaaatgtgtctgctaatttcgtcgttattccgaatcagccgccaataacgattaatagacaaacgaatacagttgtgacacaagttaatacaggcagtttaaatgtaataaaagaagtgaatacaacacaagcagcagtaggagatactttaacatatacgattgccgttcaaaatacaggaaacgttccgctaacaaatgtgttatttcaagacactatttcttccgctgtttccttcgttgcaaattctgtaacaattaatggagtacagcaaagtggactaaatccgaatacaggattctctcttccaaatattcctgcggctcaaacggttgtagtcacatttgacgtagtaattgtacagaatccagaaaatgaagatattttaaatcaagcaaatgtaacagcaagctttcaagtgaatccgaatgaaccaccagtaacaatcaatgtaccgagtaatgttgtgaatacgacagtacaatcagggaactttgaagttgtgaaagcagtgaatacgaatgtggcaacggtaggagatgttttagtatatacaatcgaagttataaatgcaggtagtgtaccagctacaagtgtatttttccaagattcaattccgccagggacattatttattgaaaatagtgtattggttaatggtgttttacaagagggggcagatccaggactaggattcccattaaatgatttacctactggcgcgagtgtaattatttcatttgaagtattaattgatgaaattccgccagggaataatgttgtaaataacgcgaatgtaactggagattttcttgtaaatccaacagagccaccaattactgtgacggttccaagtaatactgttatgacagttgtgaattcctcaggactaaatgtaatgaagagtgtaagcgctactgaagcaggtgtaggagatacactaacatatacagttgctatacaaaatagtggaacggtagtagcgacaaatgtatcattccttgatccgattccagttggaaccacttttgtagcgaatagtgtaacaataaacgggacacctcaaccaggtttaaacccgacaactggatttccacttgctaatattccagtaggaggtatagtaacagttactttccaagtggcaatcacgagtgtaccaccaaatagagttcttccgaataatgcgaatgtaactgctgatttccaagtaagtcctctccagccaccaattacaattgtaacgattagtaatattgttgtgacgcgggtgaatgtaggatcaattaatgtaataaaaagtgtaaatacaccacaagcaggtgtaggagatacgttaacgtatacgattcttattcaaaatacaggaactgtccccgcaacgaatattatttttcaagatccaatcccatctggagctacatttgtagcgaatagtgtaacgattaatggagtcgttcagcaaggtgcgaatcctatagtgggttttcctgttacaaatattccagttgggcaaactgctacaattacgttccaagtgacagtgacaagcgttccgagtggtggaaatataagaaatcaatcgaatgttactgcaagtttccttataaatccggcaggacctcctataacgactactacaaatagtaattttgtagtaacacaagtaaatacagcgagactaactatacaaaaatcttcatctgtacaacaagcagcacttggagagacttacacatattctgttgttatacgaaatacaggtacagttgcagctacaaatatttctttcattgacacgattgctccagaaacaacatttgtagcaaatagtgtaacgataaatggaacgcctcaacctggatttgatccaaatattggtttcccgcttcctaatattgcagctggcacatcattgacagtaacattccaagtgatagttgttgcaccatcaacgcttggggcagttctaaacacagcgtctgctacagctactttcttattgaatcctttacaaccacctgtaacaacaacgaactcaagtaatacaacggtagttacaataccgttacctcctcctggtgaagtgacagcaataaaaacagtaaatattgcaactggggctgttggggatgtattaacgtatacagtgctaataacgaatgtaggaattatccctgttacagatgtactcttccaagatgtcattccagaagggacgacgtttgttgacaacagtgtaacgataggtggagtgcagcaacctggattaaatccagaaataggctttacagttagtccgttattaaatgctggtgcgagtatttctgtaacgttccaagtgaccattacggaaattcctgataatgaagtcatattaaatgatgctgacgttacatttacttcacaaccgaatccgcaggagccaccgattacgcaaacgatattaacgaatttagtcgttacgacaattaatatagcttcaatttttccagtaaaaatagtagataaaggggcagcgacggttggggaaatattaacctacgatgtactaatttttaactttggaacggtaccggcaacgaatgtccaatttcttgattctagtacgagtggtgtagcgtttgttccaggaagtgtgagtataaacggagtgccagaaccaggattagatccgttcataggctttacagttccagatatacctgtaggtgattttgtacttgtcacataccaagagatggtaacgagcatacctcaaggtggaacagttgttaactttgtggacgttacggctacgtttgctgtaagtgaaacagagcctcctattactgaaacgacgacaagtaacacgacattaacagaaataaatgaatctggttggaatgttttaaaatcagtaagtcagccggttgttgcagtaggcgatacaatcacatatacaacagtagttcaaaatacgggaacagtgatagcgacgaatgttcaatatagtgatgtattaccatcctctataacattcgtaccgaatagtgtaacgataaacggtgtgttacagcctggattagatcccaacactggcttctcacttccggatataactccaggtgaaagtgtagaagtcacattccaagtaacagttgttagcgttccgtcaaacggaacaattgccaatacggcaaatgttaccggaagctttattttagtaccaggagaaccaccagttatagtaaatcagccaagtaatacaacactcacaactgtaaatagaggacgctttaatgttattaaacaagtaaatagagccgctactctagttggagatgtattgacgtatacagtgcaaataacgaatacaggaacagtaacagctaacaatgttcagtttattgatacgatttcaacaggtgcgtcatttgtaccaaatagtgtaacgataaatggagccccgcaaccaaacttaaatccgattactggatttggagttggagatatcccagttggtgaaacagttatagtgacgtttcaagcgacagttacaaacatcccgtcatcaggaacaattacgaacgttgcaaatataacaggaagctttactttagtgccaggagagccaccggttgtagtaacagagccgagtaatacgacgataactagagtgaatagaggacgattcagcgttataaaatctgtaaataaagaagcgacacgattaggagatacgttaacgtatagtgtgcaagttacaaatacgggaacggtaacagcgacgaacgttcagtttagcgatgttccatcacctagtttagaattcgttcctggaagtgtacaaataaatgggattccgcaagtaggtttagatccatttgtaggctttgcattgcctaatcttgcagtaggggatagcgtattaattacatttgaagtaaatgtaatcgcagttccgccttctaatagcattatgaatacagcaagagtaacgggtgattttgaattaattccaggagaacctccgtttacaattacgaattcaagtaatacgacagtcacaccagtaaatagaggcagtttagatatgcaaaaagaagtagatcattcaattgttggagtaggagaaacagtaaagtatacggttcgaatattaaatactggtactgctgatgcgatgaatattcaatttatcgatgtcctatctccggaagctgtttttgtaccaaatagtgtaactgtaaatggagtagctcgtccgggagtaaatccgcaggttggatttacgattgtagacattccagtcggtgagacggcgattgtaacatatgaagctacgattacgagctttccagatggtggtacagtagtgaacgttgctggggcgttagcagaatatattttagtaccaggggagccgccagttacagtgatggatacgagcaatacagttatagtgacggtaaatactgcaatcttatttgttgcaaaaggagcaaactttgaagtagcgatggtaggagatgttgtcacttatggaattgccgttataaatgacagtacagttcctgtgacgaatattgttttaacagatatcattgatccgaatactttatttataaatggcacggtaacggtaaatgatgtacctcttccatttgctaatccgaataccggtattccgttaggtgattttcagccaaatgacgcagcaattattaatttccaagttgtaataacaggaggacaaataaataatttagttacaaatactgctatagcaaatgggctcgcaactgtaaatccgaatgagccgccagtagtagttgaaggtgatagcaatacagttgttatcccgtttattcctcaaaatgtctcaacgacagtcgtaaaaacggcaaatttacaggcagcaacaattggcgatgttattacgtttacgacagttattacaaatacgggggatacagcaatacaaaatattcgttttcaagatatgttagatagtagtgttcaatttgtccttggaactgtaacgattgataatacgccagtgccaaatgtaaacccagtatcaggttttattataggaaatttaaatccaggtgaagcacggacagtttcgttccaagtagtagtgcagagcgcgccaaatggttcaggaaattatataaatcaagcgagtattcgtttcgaacatcaagtaggcacagtattgccacctgttacacaaatggtagaaagtaacatagttgtcattccatttgttccaacgatagaacaaatttgtgaaacaaatcttaattgcttagggaaaattccttttcaatgttctccgtgtaatcatttgcaaataaataaaaaataaatacagaaagagcatccggaaaaaaggatgctctttctgtatttatcatgtagattctttttcgggtgaggtgaaaaattcgtcgattttgtcggagagtagtaatggaatggcttcttttataacagaaatgtcccagtcccaccatgcgagattctctagtttgtcaatcgtttcttgggggaaacgatatcgaacaaattttgcaggattaccagctacaattgcatacgggggtacatcttttgtaacaatgctcctggcgccgataatggccccgttaccaattgtaacaccagataaaatgcaggattgataaccaatccatacatcattgccgactacgatatcaccttttgaagaagggtgaccagtaatatgtgctccttcatcaaaaagtgcattaaatggataagttgttatccagtctgcgcgatgttcaccgccaagtatgaaaacgatttcttctgctaatgaacaaaacttacctatttttaattttgtttcatcgttccaagaaaaaatggttggccctactttactataagtataatcaccaatatcatatttattatattcaggtttttgatttaaatataacatgcttcttcagcctcctttctcaattaagtgatacgtatggaatattatatgcaagatgtagtaatgtgaactgtattaataggtgaaatgaacaaaagggagtgggatgtatgcgatacgaaatgggtttatataataaaccgtttcagtcaattcaatcaggaaaaaaagtatatgaagtacgcctatacgatgaaaaacgtcaactaataaacaaaggcgatgaaatcgtatttacgaatcttacgacaaaagaaatgatgacggtaaaagtaacggaaataaagcgatacgagagctttaaagccatgtatgaacaaatcgataaaaaattattggattgtgaaaatgatagtttagaggaaatgttagaaagtacatacaaaatatatacgaaagaacaagaaaaagagtggggaacagttgcgatttgtattgaggtaataaaatgataagaaatcgcggagcggctatcattgtacaggaaggaaaaatcgctcttataaaacgtattcgagaagaggaaacatattatgtgtttccgggcggagggattgaggaaggtgaaacgcctgaagaggcaacgaaaagagaggtatacgaagaattaggggtacatataaaagtggagcaccttattgcacaggtaaaatataaagggaatgaatattattatgctgcctatattacaggcggagtgttcggaagtggaacagctgaggaatttcagtgggaaggtagaggaagttatattccgttatggctaccgataaatgagttggaaaaagtgaatataaaaccttatgaagtggtcggaaatatatttaatcattataaaatataacgtctgacaacatacaaaaaaaccattgacataggcttctgatttaagtattgtattcgagtatgtttataatcaggaggtttatatgagcaatcaaactactacacatcatgtgaaaatgacaacagcagatccatctggaattggtctatttggattagcgatggtaacacttgtagcatcatctcaaaagttaggcttaacagatggcgtttcacttgtattaccgtgggcaatctttttaggaggatttgcacaaatctttgcttgcattcatgatgcaaagcataacaatacattcggtacaacagcattcggtgcgtacggtctattttggctaggtgttggaatgacttggttaattcaacttggagtatttggcgaaaaattagcacaagctgcagattcaaaacagcttggtgtagcctttatcggatatttgattttcacaatctttatgacaattggtgcaatggaaacacataaagtattatttatgattttcgtccttattgatttcttatttatcggtctttcattaagtactttaggtgttatgccgcatgcaatgcataatttagcagcatattctgaacttcttatttcattattatctttctatggttcagcagcagcagtgttaaacacacacttcggaaaagttgttttaccagttggaaagccgtttggtatttttaaaaagtaataaaaaagcacagatgattgtatagtcatctgtgcttttttatttattgaaagctatagcagtcgtccttgttaattcagaaattttttgagagctcgcagaattaccgtctattgttacatgaacttgttgcttagggttcgctgtaactacccatgcgtttggtaaatagcgtgatttatgagataaggtggaagggatatttaaaatatctcccattgcatataatgttgctgatgatccaccgtccattgccatcgcattgacagcacctttttcataaagaatatcttgacaatctctcaaggaagcaccaatgctatgaggttgtctaccatcaatgacgaaaaacataatcgatccatcttttttctgagccataatgcttcgagggccatatccccaaccaccatcatttgtaatcattttttctccatttacaattagctgaggcataaatccagcagcggaaacaacatttttatttaacaattggttagcagaaaactctccagaaaccatttgtccatattttgtaataccactagtgagggtaggggtattaatatctttcggcgtgtttataactttaccgttttcaataacaataccgattccggttttaccaccaccatgcccggtttcatcccaaaaaccactggcattgacagcggcaactgcatggtttcgctttgccattacgtatattttttctccgacgtctttaccttctgaaccttgctgggtaacaagttttacgttgaatggattactaattgtcattaatttcccttcgaaaaaatgatcattatattttttctttattgtttcaatagaaacatctagtggtaaatcttttcgtctttctaactctttttttgaaagtttagaagttaaaaattcactatttttccattttggatttgtgatggattgagaaatatcatttaattcttcatcagacaataacgtgaattttgcatattgtggatgctgagaagttaaaatactctcggctgcgataacacgtaaattatgaccgtatgaagtaccgaataaaataatagcagctcctattagtaagaatattgttaaaagggaggttgcttttaaaaatctaataaaatactttctcatcataaggactcctctttctgtaaagtgaacaattgattagagattgagcatgatacaaaaacattttttatttgaaataagtaatgtgaaatgatgataatacaataatgtttgaagatagatttggcaatagttgaatatgaatgtagatatttaaaatgaaatataaatagtcagatgtgaaatgtaaataaaagtagaaaaaaatcaattgaaattgattctcattattaatataatgagaatgagaatcatttattgttagagggggatgccaaagtggcaaaaattttaatagcttatgcaagtatgtcaggaaatacagagagtattgctgatttaattaaagttagtttagatgcttttgatcatgaagtagtattgcaagaaatggaaggcatggatgctgaagaattattagcttatgatggaatcattttaggatcttatacgtggggcgatggtgaattaccatttgaagcggaagattttcatgatgacttagaaaatatagatttagctgggaaaaaggtagcggtgttcggatcgggtgatacagcgtatgaactgttttgtgaagcggtaacgatatttgaagaacgtcttgtagagcgcggtgcagagcttgtacaagaagggctaaaaattgaattagctccagaagatgaagaggatgttgaaaaatgcagtaattttgcaattgtatttgctgagaagttctaagaatgggagtgtcaacgtggagacaatgttaagtgtaactgctattacaaagttaagagatggaaaactgttgttagctactacatataatggcttatttgttgaacaagacggagaatggaaacgaattttaaatggttttcaaaaacgaattagggatttacatagcgaagataatgtagtttatggtgtaggtgacgaagggatttttattcgtagtatgaatggtggagagaactggacaattcagcgttttccaacaaaagcaacgagttggaatgtatgtagcaatgtacaaggaaatgttgttgctcatggagaaaaaacgctgtatctttctaataatttcggttcgacatgggaaactattcatccgtttcttgagtatggcagtgcggcaccgtctattcgatcgttatttttatataaacattacttatttattggtacgaaaatacatgctaaatatggtggtgtttggctctttgatttgaagacacgtaaattaaagaggattaaaattgcgatgaatcaaatgatctccgcgttgactttacacaattcttatttagtagcggcaagtggatcgtgcaagggagttagcgggaatatttcttattgtaaaatagatgaaagtattgcaagtgaaaaaatatattggcacacatgtcaaagtgagcagaaagcaagtagttatttagacttaagtgtagatcaacatgttttatatacaacttcaacgcaaaataaggcgggtattagtggtgtgtgccgtgtgcttcttgaagaaggtattgttacagtatgtgattcagttaaagggcacggatggcgcattgttaatcaaaaagagggttatgtagtagccggatcaggtgaattaaaagcaatgcagtgggaacaaaaaataatttaagaaaaaactttacttttattatattgatatgatatagtatgtttaaaccattttacttttaataatatagagatttaaatgagctgtaacttccgaggaggatagcaatgttaaatctcctcaggggttgcagttttttaatatctggcttattattgtaaggtggttgaaaatgaatatgtacatataggtacattgtaggaggatttttttcatgcaaaacggtaaagtaaaatggtttaactcagaaaaaggtttcggtttcatcgaagttgaaggcggagaagacgtattcgttcatttctcagctatccaaggcgaaggcttcaaaactttagaagaaggtcaagaagttactttcgaagtagaacaaggtaaccgtggacctcaagctactaacgtaaacaagaagtaatttttgaaaaaagaagggctcgcccttctttttttttgcacttttatagatgtcctcctacttacatatcataacaagactgaattttcatttatttattcggagtatttttgtataaagtacatgaataaataaatactgaaaataaagtgtttgtgtgaaaagcaatttagaaagaggtaaataaattgaaaaacgctacacatttcattgtgtttgatattgaaaggaatttcagaccgtataaatcagaagatccatcagaaatagttgatatcggagctgtaaaaatagaaataggtacaatgaagataattgaagaattttcggagttagtaaaaccaagtgcacgattaactcgtcatacaacaaaattaaccggtattacgaaaaaagatttaatgggtgtagaaaaattccctcaaattatagagaaatttattcagttcatcggcgaaggttctatatttgtttcatggggaaaagaagattatcgctttctatctcatgattgtacattatatggtgttgaatgcccaagtatagaaaaagaaaatagaattgatttgcaaaaatttgttttccaagcatatgaggaattgtttgaacatacgccaagtttacaatttgcggtagaacagctcgctttaacgtgggaaggaaaacagcaccgtgctttagcagatgctgaaaatacagcaaatatacttcttaaagtgtatagcgagagagatattaataagcgatacaaaagacatggtgaacttgaacttgtaaaaaacggaaaaataacagaaaaagcgaaaaaaaagatgcgaaaatgggtgtttaaagaactaaagaaaaatacagaacgcccttttgaatggagtacatttgaaagtggtgacacgtgggaaagtataacggaaagatattatataagtgaaaatacagtagaactcctgaaaaaacattttcgtacagcagtgagaaaagcggaacgacagattaggtatttggctgagatggaggagaatacagaggttaaatgaattgctcctccatctctaactacatacatgtaataacagcgtattgatattaaataggcatcaacttgttgttgtgattgtacattataattgctttgggagtgttaagacgtaataagagttttaaactgtattaataaaataaaaatatatataaagaaaagagtgtagtttaatggaaacaatctttaacattttaactgttttagtttttgggataatatttaccacacaattagcattaactacactttctttcatagtaaagaagaattggaaaaaacttaatatctctttaagttgtggtgtattaaagtttaaaatagaagagtaagattgagttttgtacaagggaggtatgatagtggtagacttggatattaaagatgtcacagtaaagatggaattaaacggtgtcttttggaatgaggatcggattgctgaaatgaaggtgactacaaaagaagagcattccgttattcttcgtctagtagttgatttagaaagtaaaactattagggcgacgagtgcggaaatagtgaatggattctgccctctgtgcaaacagaaaagggacgaatgtagtgaacttaatgacttgcaaaacaaaatggaaattttagaagaagcctacgattgggtgagagaacatccggaatatcgttttcaattatctttttacgagtacaataaatttgaggtagtaaagtgaaatttgcattttaacaacttatagaaggacttggtcaactagaaatattgaagtagatatttctaatggaaataagcctgtataacaaggaagggatatatttgattctgcaacaaatgtcatcttgcatcaaaaaaatttaaaaataaacatgttttattataaagcagaaaaatcgattcttagtagaatcggtttttaatataaataaaagagcgcttattaaaagcgcccagtaacaacagttatatggaagtatttatcccgtaaaagcccgattggtgagggctaataattagtgggggatgaacaaaaccccacagattaaagtttcactttattcaataccgctcggatcaaacgaatactgctgcttattctcaatccgctcaatcacatcttgcagctcatctggcttcagaaactcaataggagagaagcctttttcaaatgtaagtgtgtctgcttcaatcataagtacatatcgatcatttaccttcgcaatatgtatttgatccccaaaatccgcaagcaacgccttcacagagatatgatcggcttttagttttaattccacttcaggagcatgctcgacgatttgagcggttgcttccattacttcttcagttgaaaattgttccataatttcgcgtttcggactggcagcccatacttccatcgcttggtcgaattgttcgcgttcttccgtaccttcttcaaatacatcttcaatttggtcgtataccatgtccattacttgtgttttcataatttcaggcatagagcgttcatattcgacgaattttaagaagtcttcaaagtagcgggcatgtgatgcttgatgtatttttagttcgcctacttcaaccattccttcttcaggcatgtacggatattggatagatttcatattctttgttgtgatggccatttcaacgttacgaatcagtgttgattcatcagaaatagaagcaacctttggttcaaagtcgcatttcattacgaatacgaatggatcatcaaagtatttgcgtagttttgcctgagcaattaaaaatacaccaccacgtacagcgcttgtgtcaagatatgtataaacgagaggttcgctcatatctttaaagttttcttttgtttctgcaaagcgaatacgattaaaaaggttgtaatgagggtttgaatcaagttcgtgcccttcttctacaataaagcgaccaatttttgttggggcttgttctgtttttgcatgacgttctacttttcgcttcgatatttttaataactcaccattcaaaaattcttttaaggaactatcttcatattcttcagcgtctaaagtttgaaaatgtttgtagcgtttatcaactgcttcaccttttccttctacttgtacaacataaaaggaaagataatttatttcaaaatccatatttatcaccttgtttcatttcattaactcttatcagtatagagatggaaaaaactttcgtcaatttatataaggaaggggaagccccttcctttatataatctttattttctcgattaaaatccgtcttctaatgctgcgaatggaatgtttagtctgttttctactgtgcgtaaacgttggtttaagcggtttagtctacgtgtatggcgctcaactgtattttctagttgacgaactctttgttcaagctcatttacgcgtctttctaattgacgatttccagtgccaggaaaagagattggaagttggaattgtctattttggtcatatggattcgtgtgctctgcttgatctatataagattgatattgtgtttgtaagtcatactgtggttgttggtacgcatattgattatatggatcatatggattgtagggatacataataacatcctccatttctttaaaataggttgaattcaccataatgtatgtgtaaaagcggagcggtggcacggcaaatacctatttatgttgacgggatttctctttatcccgctatttgctgggcaataagacccccactggttacagtttcactttataaaaaatagcttgagggtttttgatttgtatttcttttgtgtaatggtatatactggataaaagggagagtttacataaaagttacaattctatcaaactcaaacttttatgtaaatatgtatagacatttataaaagaaaagagtaatttatatagagtgaaaaataacttgtaacattttataaacatattgtaaaatgattgtaacaaaacatacataaaaatgaaataaatacataatagtgatgttggggaaagggagagagtatattgttccgtaaagtaaagggtatattagttggggtgttatgtgtagctataataagtggctgtggtgcaaaagtaagtgatgttgcattggtaagtgatattggtgggcacactgtagaggctaaagcagaagtacaggatactattagtttagttgatggtcgaactggtactgaagtgaaaaaattagatttatctagtttaggctattttgaagatgaagcgaaatttaaaaagtctgtcacaaaggttgttggtgagattggaaaaagcgtcgacaaaaaaatggttccttcacgtatagcacctgatggaagttggcaagaaggaaaaccttcttatgaattaatggaaaaagaattagtagataaattgttaaatgttggtatgtgggatgctacgtatcagttgccgatcgtggagaaaaaaccagtcgcaacattaagtgatgcgcaaggaaatggtgcggtaattggtagatatgaaacgaacttaggtggttcaacaggtggccgtattgagaatattcgtttgtcagcagcgagcataaatggagttgtgttagcaaaaggagaccgtttctcttttaattcattaatcggtgatacaacaccagataaaggatatcaattagggaaagaaatagttgatggtaaattagtagatggatatggcggtggtgtttgtcaaacatcttcaactttatacaatgcagcagatcaagctggcctgaaaatggtggagagaactacacattctaaaacggtaggttatgttccacaaggaagagatgctacaattgcatatccatatttagatttagtatttgaaaatacgaatgatgcacctgtgaagctttatatgggcattcagggtggaaagctagttgctgaagtacataaaatgagataagagttataaagccaccttttctgaaatttagaaaaggtggcttttttattatgaaaataaaaatgtatataaattctgacttttcttatttacataggatgattttagttgtatccttcatagtaacggttatatgtaatggaaaaatatagggataaggagatggagttattcatggtacaaattcatccgaaaacacgtattggtcatgttgaatttaaagtgaaagacttagagcgtcaaattgctttttatgagaatgttgtaggattagaggtaattaagcaagaggggaataaagcatatttatctggaaaaggtggaaagaacgcgttacttgttcttgaaaagctagaggacggggtactgcaagaaccgcgtacgactggtatatatcatgtagcctttttagttccgactcgtgaagcttttgcttctgcgctatttggggttcttcgtaataagaatgtaattgacagcccggatgagcaagaagggcgttatacatattcaaatgaaattttaccaatttcaaggtttaatagtgcaagtgatcatacatatagcgaagctttttatttgcaagatttagaggggaatggtattgaaatttatgcagaccgtccgcgtgatcaatggggagaagggtcaggaggaagtacaccacttgatttaaaagaattggcgacactcgttgattatgagtttgatggtttgcctgctaatactgtcgttgggcacgtacatttacgaatagctgatgtagagaaatcacatgaattttatgtggaaacagtaggttttgaagtacaacagcgtgaagaggattgcttatttatttcagcagggggatatcatcaccatattggtgcaaatacgtggaacggagtaaacaatccacacccaccagtatatgcaactggactaaaggtatatgctattgtactaccgcataaagaagcgttagacgaagtgaaagaaagattaatagaaaaacaacatgaaataaatgaaactacaaatgggtttgtggtggtagatccaagtggtattacagtgcagtttgaaatagaagcagtgtaaaataagcgagaaagtgtataatcactttctcgcttatttgtaattattcatagctcaatccaatatcttcttactatattcccatcttcctcagtgaaatcatcatcacgaatcccgccgttatgcaaaatcgttttttcagaagcggtattcacagcgtcgcaaacgacaagtactttcgtgatgtctaactccttcgttttttctaatgataatgctagtaacttcgtagcataaccttttcttctttcagaagggcgaatgccataaccaatgtgaccgccagcgttaaataaatgtttggttaaactatgacgtatattaacagctcccacaattttattttcatctgtaacaagccaatatgtagagtctggtacccaagtttcagggatatttattccgttatgcgcatcgagaagttcttgaaccatagctgggaagttggcaggattttttgagataacccacgggatcattgtttcaccgctatctttccattcgttatagaaatctaagtattcttcttgtaaatcagtagtaggtgtgagtaatgagacgttcattgttagtaagctcctttatttatatagtttttataaaaaattacgatacaaagtgaaagcgttttctataatttctcaacctaatttcatgtaatccatctttgtttttttagaaaattagtggaggtttaaaattagaagttatttattttatgttaatatttaaaatattaacataaaacggtcggagtattaagtatattttagcggtatccctacatgtaaataaaaggatgtttgtgataatttttgttttatctatctataatgaatgaaggggggaagtgcccgtgagtgtagattttgattttattatacgaatcggtgttgctggcttgttaggagcaatgattggtattgaaagagaaattcgatcgaaagaagctggattaaagactcatttcctcgtagcggtaggaagtgcgttaataatggttgtttcgaaatatgccttttcagatattgtgtttgaagagcatatatctctagacccaagtcgtattgcagcacaagtcgttagtggagttggttttttaggtgcaggcacaattattattcaaaagcaggcggtgaaaggattaacgactgcggctggtttatgggctactgccggcataggattagcaattggagcgggaatgtatgtagtaggcattggagcgacgattctcgttttaattggtttagaaattgtaagtcgtatttttaaggtgcaatttttatttccacaaaatataacagtgcaaatgtttgtaaataaacatgaagcggtacaacaaatattagaaacactacaagtgaaaggcatcccaatactctcatatgaggtggaagcttcacagcaaggtacagaaactgtttataaggtagggatgcaactgaaaaatatatcgtcagaagaaaagaatgagtttattcagcatatgcaaacattaccggaagttacatttataaagttaaaatcatagtgttgaaaacgaggatagatgtagcaggaattttgctattatctatctttttttgatataaaatgcacggaaagtcaagcgttaattttatatggaatggatacatgtgtgaacgttaccttattttttctcaatacaggacaaaaagtaaaaatagtaaaataatggagcgggacactaaaaatgtaaggtaggggagagcatgaaaggctattcaaagaaaatgttagtaggggtaagttttgctagtttaatgttagggagttttcaaggggtaagtttggcagaagatactaagggagagcaagtttcttatcgaaatgtgctcaaaatggagccagtcggtgtacaactaccagtacaagaattagctcattcatcgaaagtgctcgaaagcaagtcttttgagaaaaggttacaatttgccgatttatcacaaagaccacctgaggtgaaaaaagaaagtaagcaattagctgtagcgaaaacttatacaattgccgaattaaatcaattaagcaatcagcagttagtagatttacttgtaacaattgattgggagcaaattacggggctatttcagtttaatacagacagtctagcattctatcaaaatgatagtaggatgcagacgattattgataaattgaagcagcaaggacaagcctatacgaaggatgattcaaaagggattgagacattagtagaggtattacgttcaggattttatttaggattttataattcggaacttagtaaattaaatgaacggagttatcatgataaatgcttacctgcattaaaagcgatggctaacaattcaaattttaagctgggtacattagagcaaaatagagtggtatcatcatacggaaagttaataggaaacgcttcgagcgatgtggaaacgataacatcggctgcaaagatttttaaacaatataatgataatttttctacattagtagataatctttcagctggaaatgctatttacgatattatgcaaggtgttgattacgacattcaatcgtatttgtacgatacgaggaaagcaccgaaagatacagtatggtatcagaaaatagatagttatattaatgaattaagtcgttttgcattaatgggaacgattacagcaaaaaacggttggcttattaataatggcatttattatacaggtagactcggtatgttccatagtacaggaactaaagggttacaagttgtaacagatgcgatgaaaatgtatccgtatttaggggagcaatatttcgtagctgctgagcaaattgcaacgaattatggcggaaaagatgcaaatggtaaagtggtgaatttagatcaaataagagaagatggaaagaaaaaatatttgccaaaaacgtatacgtttgatgatggagcaattgttttaaaagctggagataaagtgacagaagaaaaagtaaaacgtttatattgggcggcaaaagaagtaaaggcacaattccatcgtacggttgaaagtgatcaacctttagaaaaaggaaatcctgatgatgtattaacgatggttatttataatagcccagcagaatatcaatttaatcgtcaattgtacggttatgaaacgaataacggtggtctttatatagaaggaacaggtacgttctttacttatgagcgtacgccagaagaaagtatttatagtttagaagaattattcagacacgagttcacgcattatttacaaggtagatatgaagtaccagggttatggggacaagggaaaatatatgaaaatgaaagattatcttggtttgaagaaggaaatgctgaattttttgcaggggcaacgagaacggataatgttgtaccgagaaagagtattataggaggattatcttcaaatccagcagagcgttatacggcagagcgaacgttaaatgcaaagtatggaacgtgggatttctataattattcctttgctttacaatcgtatatgtacaataagagatatgatatgttcgataaaatacatgatcttattaggaaaaatgatgtaacagcatatgatgcatatcgctctacattaagtaaagatgcgaatttaaataaagaatatcaggactatatgcaaatgctagttgataatcgtgagaaatataatgtgccattagtatcagacgattatttagcgaatcatgcatcgaagccagtttcagatattgcagcagaaataacagcggaagcaaaattgaaaaatgtatcagtgaagaaaaataaaccacagttctttaatacattcacactacaaggaacatatacaggaactgcagcaaaaggagaatatgaagattggaaaacaattacacaaaacgttaatgatacgttaaaacgtttaagtgcaaaggaatggacaggctataaaacagtaacagcatactttgtaaattatcgcgtgaatacatcaggacaatttgaatatgatgttgtgttccacggtattaatacagaagaaggtgcagagaataaagcaccagttgcagttataaacggtccgtatagcggaaatgtaaatgaagcaatttcatttacaagcgacggatcaaaagatgaagacgggaaaattacttcgtataaatgggagtttggtgatggagcagtaagtaatgagcaaaatccaactcacgtatatacaaaagaaggaacgtatacgacgaaattaacggtaacagacgataaaggagcaactaatactgctacagcgactgtaactgttcaaaagaaagaagataacagtgtagaaaaagaaccgaataactcattccaaacagcaaacaaattgcagttaaatcaagttttacgtgctagtttaggaaatggcgatacaagtgatttctttgaaattaatgtggagactgctaaaaaccttcaaattaacgtaacgaatgaaaataatattggaatgaactgggtactttattctgaagcagatttaaataattatgttacgtatgctcagcaacaagggaataaactagtaggtagttactatacgtatccagggaagtattatttacatgtgtatcagtatggcggggggacagggaattatacggtggaagtgaagtagtaaaaggggagttatcttgttcaatgaatggaaaaaggtctgtactttaatgaaaaaacaactgcaggcaatgtctctaatgataataacaaattaagtgtcgcgagatgttatatttatattaaaccaatctaatcagtaaataagataaaatagatgaactagtatttcatcacgatgtaagaaaagttataaatattaagtgtttttaattgaattaaactaaaggatcagagtgtatctgtaacaatagataggctctgatccttattatatttaattaacgcatatgaatttaagataattaataagtaagctagctagcgggattcttaaaattcatttatgtaattaactaaacagaaaattgttatcacattagcaagggatactaatagaaaagcgtgtccctttacctaattcactctctatttctatatcaccgtttaattctctaataatactataagcaatcatagtaccaagcccagttcctttttctgttgttgaatagaatggcaaagcaattcgttttatttgttgagatgacatcccaattcctgaatcaataatatcaattatgatatttccttttactttttgtatatttatttgtaataatccaccatttttcatagcctcaattccgttttggatgatgttgtttagacagagtttgaatttttcggggtccccatttatataaaaggaatctgtactattttgtttgatttcaactttgtatgatagagcgagtggtgaaatagtatctttcacctgatttaaaatgtgattaatatctattttttcttttagggtattctgtggtttggttaaagataaatagttattaatagtagattgtatttgctgcatttcaattaacatgatttctaagtattgatcctgagatagcttagaggcatgtttttcatttaataattgagtgaatccatgtaccgtggttagtggattgtggatttcgtgtgcaattgacgctgctagttcgctagctatataaaatttttcagctcgttgcagtttttctttcattttatatttctcaatcatttcctctataaaataaactgataataatactgtgaaaatattaatgactatataatttaataaaaattctatgagagtagagtctattttacctcctgtatttatttgagttacaataccgcaaatagaaagggaagctgtacatactaaaataagaagtaagcttaataatatctttttttctttaaaatacataggtaataagtaacgaaagagcattgttataacagaaatgatagtaaagataataaatgatggaagaacgccatttccgcctaagtaaaaccggtaagaaagatataaaattcctataaaaacaatgttttttgtatttccatatagaaaaactaatattataggaataaaacgtaaatcataaataaatcccacatgtaaatgaaaaggaaaagtcatacaaaaaataatagcaatggaggaaaggatagaaaataacatattattacatgttattttttctttaaactctagccaaaatacgtgatagctaaggatacaaattattataataaaggtatttaataaaagagtagaaattcccatagttttgcatctccgatagtttgtaagtagaattatgtatgagttggacatagatgtttagtattagtagactttttatctaaaaaaggaagggtacttgaaaagtgctgttatattactcgtattaaaattgataaggaaaatagaaaaaaataatagataaaaaatctatttaaatttatgtacatatgaaatcataaactaacttttgtataggtgaaatttggattgagttactgataaaataagtctttttaagtatgaatattctgtgaaaaagatatgcgtggtgactcctgttttgtagccttcgttatattaacatggaatatatcaaattacaaagtgaaattttagaaaaattttattagtacattttatctgaaatagaaatgctatttatttgagtattttggtacttactcgtataaaactttgttagaaaaagactttaaaatttacatgttttttatgaagtgtaatattgtagctttatctatggggctttctcaataactattaaggcgaaaagttaaaatatataggtttatagatatgaattattacataaaaacgcacttaaaaaaggatgtatgatggtaatagaatacaaacatcaagggggaacttaaaatgaagttaaataaactagtgcttagttgtggagtagtttcagcattaacacttggtgtgttagggaataatacttatgctgaagaagtacacaaaacgaatgatccaattcatgtagttgaacatgtttctgcagacttattattaacccaaacaatgaattatagtggcgaggctgaaacttctttcgtatatgatgggagtactgacttaagcttctctatgaaaaataatggtcaaaatacaatgggatatagtgtaaaaggtccaaatacagagctaattgttggtggttatataaaacctggagaacaacaaattaatgttacaaatgtacggaatgctttatctccattaccgaatggaacatataaaatttacgtttcaaatgatgatggttctaaggggcaattccaagtttcagtaagatctgtgaattaaatttaaaacgctttgtttttaagttaatttaatctttgcttattggaaagaagctaaaatgaattgagaattaccgataaaaatgaaaacgagcaccttatctaattgtgagagggtgttcgttttttgctattaaacagaaaataattataaatatattttgatatccccattgctaacctactagattgtgtcaacgagagaatgtctactataaaagatattaaaataaagatgatgtaacattccgctaaattatatggggaaatagaaaaaccacccttatatgagtggtttttagtaattatttttaggttatacatttaaaattaggctaagttatagaaataataaacatttaatctgttgttattattttggttctggataatgattgtagtatgagattctaataaattcttggtagacatttgttaatttggcatctctaagagcatcgttgaatttttgcatacgtacactcccttgagcgtagcctccacctggagtataagggtttctagcttcaaagtcatccaaaaatacttttaattttttatagtcttgagattgatagaaagccacagcctcttcaggagtgacatcaaagtaagaggatgacgttgagttataagaagctgcttgagcagtaggtgcctctagcatagttgcagctccaccgaacatagtaagcgccatagaagatacaataatttttttaaacataataaaacctccatgtagaatattagattaatagtaatcctgtaatcattatagttacaatgaaaatgattatcaaatgcaatattgcataatatatctcgttatttttgggcagtaagactcccgcacaaaaattcaatgaaagtaaagaagttaggtgggaatcgggcggattaaagtttcactttattatttgaacgagaagtcacctttatatttaaatgaaggagtgtaatagattaaaagaggtgtataaattactcaggttaacaagaaaatgaaaaggctatttttaataggggaaagcttaataactggagtaaaggaattgctatttatatatttaacatacatatttgtcttttaaattgtaggcgtgttttagaatttgtatatagtaaattcgttaaaaaacttgataaataataaaatgtgtaaattttttgactattttattaaaattatttaatatttgtaatttattgttttataatgataattgggtcgatcgtgaatgttttagatattgcgatatatactcggattaatttattttagggaggttacaaaattgggtaagagagtcattataagagtttttacattattatcagtactggcattattccttaatgtatttttacctagggctagtgcagaggttatgacgcatgagaaatattcaatggactggagttatagtaatagtctaggtaagtacattcgcactgaaatgattaaaaattcaagtggtcaaattgcttattgcttaacccttggattaaaatcaccaaatggtgaagatcttcctgaaatggggaaaacagataatgtagtatatagagtcttattaaatggtttcccgcaaaaaagtgctgaacagctgggagtagctaataaaaatgaagcgcattatgcaacgcaacttgcggtttggaatgcattaggtcaactcgatgtaaatgaattaaaacatgagaataaaaatgttgaaaaagcagctaaggctattattagtaatgctaacaatagtgaagagactcaagatgtttttatgaatgtgattcctgctgaaaagcaaaaagcagaattaaagggtgaattcttcgaaacaaatctatattcagtacaaacaaatgctaagagtggttcttataaggtagtagcgaaaaatgcacctaatggagttagaattgttagtgaaaatggagaagtgaaagatcagctttcagttggagaaaaatttcgtatccaaattcctaagaatacaaaaacgggtgaatttaatttaagtgttgctgctaatttaactcaagttcaagcaattgcttatcgtggtacggatactgttcagaatgctacagtactattagagagaaatgaagaaaagcttagtagtgatcttgcagtaaattgggaagcagctggttctttaaaaattaaaaaggttggagaaaatggagaagttttagctggtgcagtatttgaggtctttaatgcaaataatgaatcagtcggaaaaatcacgactggtgctgatggtatggcagaattaaacaacttaccaattggtacttacacattaaaagaaattaaagcaccaacaggctatgtttcagatgataaaccacaaactattgaagttaagacaggggaaacaggagctgtccaaatagtaaataacaaagtaaaaggtaacatcgaaattaaaaagcttagtgattcaggaaagattttaccaaatgttgaattcacagtcttcactgaagatggaaaagaagtgaaaaaagtagtaacaaaagaaaatggaattgcaaacgttgaagatcttacgtatggtaaatattatttcttagagacaaaaacacctaatggatatattggaaataaaacaaagtatccttttgaaattaaagagcacaataaaacacttacttttacagtggaaaataccgaagtgaaaggtagtgtaaaattactaaaagtagataatgaagatattagtaaaaaattagaaggtgcagcattcgagctaaaagatgcaagtggaaaagtagttggggaatataagacagataaaaatggtgagattaacgtcaaagatttagcgtatggtaaatattcatttgtagaaaaggcttctccaaatggttacgttcttgttaaagaaccgattatgttcgaaataaaggaacatggaaaggttattgagttattggcagttaatcatcttatcaaaggtgatctagaaattacaaaggtagatgtagctgatggaaataacaagcttccaaatgcagaatttacgatttataacgaagcaggaaaagaagtagtaaaaggaaaaacagacgataaaggaatcgctaaatttgaaaagttaccatttggaaaatacacatataaagaaactgttgcaccaaacggttatgtattaaatgaagaaacgttctcttttgaaattaaagagaatgatcaaatcattaaacacattgtcaaggatgaaaagattccttcaataaaaacaacagctactgataaaacagatggtacaaaagaaatgcacacgtctaagtctgtaacaatccaagataaagtggaatacaaagacctacaagtaggtaaagagtacactttaaaaggtaaattaatgaataaagagactaataaaccattcgttgtaaatggtaaagaagtaactgttgaaacgaagtttacaccaaaagaagcaaatggttctattacactagatttcacttttgatgcaactggtttagaagaaaaagaagtagtagtattcgaagagttactgaaagacggaaaagttgttacgacacatgctgatatcaatgataaaggtcaaacagttaagttcgttaagccatcagtaaaaacgacagcaacaaacaaagctgatggtggaaaagagattcattcaaaggattctatcacaatccaggataaagtggagtacactaacttagttgttggtaaagagtacactgtaaaaggaaaattaatgaacaaagctattaacaaaccattactaattgatggtaaagaagtaacagctgagactaaatttactgcaaaagaaaagaacggttttgtaacattagactttacttttgttggtgctgaacagcaaggaagagaagtagttgtgttcgaagacttattacatgaagggcaagtaattgcaactcacgctgatattaacgatgtaggtcaaacagttcgatttgtagagccttctattaaaacgacagctacaaataaagctgatggttctaaagagttagacgcttctaaaactgtaacaatccaagataaagtggaatacaaagacttaatcgtgggtaaagagtacgtagtaaaaggtaaactagtggataaagcaacaaacaagccattattagttgatggtaaagaagtaacagtagaatctaagtttactgctaaagagaagaatggttctatcacattagacttcactttcaatgcttctgcattacaaggtaaagaagtagtagtatttgaagaactgtatcaagataatatattagtagctattcacgctgaaattgaagataagggacaaacagtgaaatttaaagagggaaaatcggaacaaccaaaaccagaacacccaaattcaggtaaaaatacgccaacaccagagcaacctaacgagcaagtaaaagaacaaccacaacttaagaaagaaattcaatctaaaattggatggttaccgcaaacaggtactaatcttacaagttggatctctatggctgcaggagcattactgttaattgttggtggagtgattttcttaaaacgtaaaaatgcatagaaattaaaaaataagcacatctgtttttataacaagatgtgcttatttttatcattttagccaagaagactcctatatttaagcgtgaatggcatttaaaatagcaaccatattttataggtaattttgaacagttaaaagaaatattacaggagggtgaaaagcaaggagtttttcatttcttctccataaatcatacaatacattggatcacttctattgttttatttccaaagtttaaaaagtttattgattttttaggaccaaatgaaacgaatgatacaaatcatgaatggatgccagaaaacttagtggacaggattgttactgcattaacagataaacctaatgtgtaaattattcagtgtttatgaattctattattactatttaaagcctaatttctcaatgtattgtagagaaattaggctttttttatcaattcattaaagtttttataattcaaggactcaagttaatgattatattttcaagtattcgttttgagctacatagatatagttttcgttgcaactgtttgttgaaatattttatcatgctcaacaataaccattgtgggattaaattgttgaataagttcttcaatctgcatgcgggaatagatatctataaaatttagtggttcgtcccatatatatatatgagctttttcacataaacttttagcgataagcagttttttcttttgtccaccagaataatgagatatatctttttcaaattgaattcggtcaaagtccatcttacttaggatggacttaaataaggtttcatcaatcttgtgctcttcaataaagcctgatagtgatcccttcaaatgagaagtatcttgttggacataggaaatgatgagtcctgtacctaaagtaactaagcctgtatgctgtatcggatgtcctagaattagttttaggatactactttttccgctcccattcgttccatcaagtacaattcggtcaccttgttcaactatgaagctaatcggctcattcacaatttgatcattgtacttaacggacacgtcaactaaagtaaccaattcatttgatttaaattgcaattgttccaattttaatgactcagttttttccgcattttttagtaattttgatttttcctcaatagctttttgttgccttgattcaaggttttttgctcttttcatcatcttggctgctttatgtcctacaaaccccttatccaacttagagcctgaattcctcgttccattttttgaagcttctacgtcattagaccaacttgctgaacgtttggaagactgttttaatcgccctatgtctttttgtagacgctcatttgtagccttctcgtgttcttgctgtctatcaaaatttaacttccaagaagaatagttaccactttgaacttcaatatttgctctattaatagataggatatggtcaatgcacccatctaaaaagattctgtcatgtgaaattaaaataaatccttttttcttccttagataatcggagactatctttcgtgcatctgtatctaagtgatttgttggttcatcaattaatagaaattgacccgcatttaaaaacagtgcagcaagcaacacttttgtttgttccccatttgataatgttttaaatggtctgtacatgacctcagcatcaacatttaaataggatatctcacgtagaagttcccaatctgcggcttggggacaaatttcttcaaggatttcatgagtgaatttgttcttatctgaaacagagtaggggaagtaattgaattctactgaagcaaggattttcccgctatactcataattccctaacaataaattaaagaatgtcgttttacctcgtccgtttctaccaataaatcctagcttccaatccgtatctatttggaagtttacactttcaaaaatattatcaaagctacctgggtatgaaaaagttaagtcttggacctttatcattgacataataattcctcctttatatatcgaaacgtttcatataaagtcggaacatccatccattttttaattcctctatataagtttgatggatattaacgacttatatagagcattacatgtgtaacaatagtatctgaagtactcatttttctcgctcctttatttgtgaagtacatttaacaattagtaagtttcaactaagacaaacgggaataaaaaaatcccccaatttgtaatcggaaggattagtctttcgtctatacttaataagtacttattaatcatttgaatcatgacaaataaagtatgaactgaattttaaaaatggatagactaaccctatattttgtagtttgaagttataaaattcaacttaaaatataaattagttaatcattattcatccatcattcctttcataattctatttttagagtaacattctttttagggagatgcaatattagcttcaatttcatctaattctaaatcatttataattctttgagtaaggagataaaactttaccgccctttttataaacatcacatttttgttcaataggtcatgtcttttgtccgttaaaaagggaggatatgaaattgacatcaactttttatgtaactataatagttacagttggtttcgtaaactaatttgaatttctattttaatgatagtatattttcattcctttttaagtgtgacagatagcaactataatccaatagaggagtagattctatctcatatgtaaagagtagataagttgtacccgccaaatttacgatgcgcaaatacttaaaaaactacatttttcagcttatcctttttagaatcctcagtattaataattgtaaacatctacaaaaagttaacaagactgttgtatgtagaaagaaatcttttaaaaaggtcataatatggataataggtagcacacatttaaatttagtaggagttgtgccactatcaagacattttttaataaaagtatagaaaaaactcaagaaggtgagtccattgcgtaagcatgcatatgtgcaattttatgtattgatattggctttaatagcttatataagcttttgctttatatttttatttgtttttccgaatcattatttcgtatcagattttaatatccgactatcatctttagtcgttgaaactactgtatttatctcattactgtattctatattatcccaaaaaattaagttaggagtattctgggtttgcattactattgcaatagggtgttttttgataggaaatttcatatccgcttttcaagtacttaatgtagaattaccaatacaaaattttaatatttctgatgtatttctactgtttttcttattcttctttctttttgcgttcttttataaaattatgatggaatgtaataaatgggagaaagcatatttactttgtgatttatgcattgttgttactgctatttttacattagagtggtacctatttaataaaccatctgcaaatattttattcttatcaattggagatgtttttctctcatttatttttccgattatagatttattgcttctattacttggagttacactgatctttcgacctgctattttcaatgcaaaaagtaaattgtttatttttatcctagtattaactggattggctattacggactatttgtatttttacttacaaggtgatttgtcagagcgttcagttatatttttaaggtgtttgtatagagttttcctattatttatcgctattgctgctacaatcccatgcccatcaacttaaggatagaaactctacggttttccattaattgaaatgaacaaacttttaaacagtataatcctcttaaaaatgagcatacgaaataaaccctaacgggtttcatttttttcttatgcagctttcttttgttttctcaatccattatactcatagacaacacccataatatcaaagatagttttcttctcatatcgatgggatttccggccatttttctttagtagggtaaacaggcggattaaaacctttgttattatacgggtgtttctctgtatcgcttgatataacagggatagatgatcttgaatcatcccaattgctttatattcgcttagttctcttttgtgcttttgcaacagaagttggcgcatcttaaacatcgtggaagaacatataaaaatggcaatgagttttccatacacatggcattctaatcgctcttgtttgatagtttgccaatgatgaatttgaaatagagatttccacgttttaaatatgatttcgatctgccagcggagggagtaaaaatcatggatttgttccatcggaaccacttcaaaacaccccctatttatataaaaaactccccttgacttctcatagttggtctttcaaagtaaaaaaacacacccatccctaggaaagggacgaatgtgttttcgtggttccacccttgttccaatctagacgtatctccttctagattgctcaagttcagataacggctgataccgccaataattactagattactcgttcactattgaagttcaaaggtggtaaaatcatttctcgtgttaggaagctcacacccttggcttccctctctgtaaaccgtaaaaatgatttcgtgtccttatcgttactttttcgttcatgtttatttgttaactcattatactcgcataaaaaacaaaatcaatactattttttaattattttaaattttcaatctcttataccataaaaaacacactcatccctaggaaagggacgaatgtgttttcgtggttccacccttgttccaatctagacgtatctccttctagattgctcaagttcagataacggctgataccgccaataattactagattactcgttcactattgaagttcaaaggtggtaaaatcatttctcgtgttaggaagctcacacccttggcttccctctctgtaaaccgtaaaaatgatttcgtgtccttatcattactttttcgttcatgtctatttgttaacttattatagttatcaaatttttaaaaagcaagcctatttttactaactattttcaaaatgattttttattatatttcacaatagcattatgcaactgccactcaatttacctattttgtcatttctccagttaataaatcaacggttcatatataaagtgaaggctaataatcagtggggattttgttcatccccactgattattagccttcaccaatcgggcttttacgggcagttgatccccacctaacttctttgctttcgctgaattttgaggtaggggtgttactgcccgttaatgcgggataaatccccattctaaaacccgtacatactcaccttacaaaattatatcaataaaatttttaatacaatctttttgtataactttcttctaaagaacgtgcaacatcttcttctgaagcattcactttcgcatgctctaacaacatttttgctgctgaaggtaactcttttttatttaaccaagattctggatcccatatcttcgaacgaataaacgcttttgcacaatgaatgtaacactcttctatttcaacaacaattccaagcaacggattacgtccattcgcctgcatttctttcaaaatttcttcatagtttgtaatatacgctcggccatttattctaagtgtctccccaagacctggaataaaaaagagtagtcctacacgtggatttgaaataatattcaaaatggagtctatacgacgatttcctggcctttctggaatgataattttattattattgagtacgtatacaaatccaggtgcgtctcctctcggcgaggcgtcacactcccccaacttatttgcagtagataatactagaaaaggagatttagaaaggaaatctacacaatggtggtctaatgatgaaataacttttttcaatgctcgctcacttggtttccccaatattttccgtaactcttcctctgttgaaataatcgattttatttccatacgctctatctccacttataatcgcccctttttctttattttcccaaaattcaatacgaatattgtataataaaatttgcagaaaggggaattaaaatgacagagtggttaacaatatttgattctgaaagaaatacacttgggaagaaattacgcgatgaagtgcatcgtgacggtgattggcacgaaacatttcattgttggtttgtagaaaaagatgctaaagatatattcttatatttccaattacgctctaaaaataaaaaagaagctccacttatatgggatattacttcagctggacatattatgcatgatgaagatgtacaaattggtggtcttcgtgaaatcgaagaagaattggggctttcctttcaaactactgatttagtatacaaaggaatctttaaaatagattatgaaatttcaaatcttactgatcgtgaattttgtcatatgtattttcacaatgtcatcaatccacttccattcgcaccaggtgaagaagtagacgatgtgatgaaagtacatgcaacttcttttctacaactattaaatggtgaaatttcatcttttacagctagttctgttttaaacaataaaccaattacaataacatttgaagatatttatccgtatgatcttgcatactatgaatttgttatagagaaaggaaaagaattattaaaaaataatagtttataaataaaataggactcttagcataatattgcgtagagtcctattttttattattgttcaagtatctttaatttattctctacttgtataaataaaagaataattaataacagcataaccaccataatcgctattattgtatgtggatatctaaacagtatactaataacacttccaattaacatcatgatgaatccgttttgcttcatcacttctgcactatacctgttacccgcatcccataattccttatttttcatagatcgtttcgtacgataaccatatgccgcattaatatcggtcggtggatttttttgaagaacaattgccgcaagtataaatatagtacctattaaaatactcattcctatgtttattagtgcatacatcaattatatcccctcctaacttacaccttcattatacgacatgacccttttttcaaatttataacacattcaatttctttcttttgatgtgtggaacatacttggaagtgttacaaaacgtgcccctttcgtttttaactgcggaatgattttgtctagtgcatctacagatccttgtaaatgcccacctggtgttgaatgctgaaggatgacacttcctggaaatgaattccctaatacattatttgtaatcgtatcagcgcttacacctttccaatcaactgtatcaacactccactgtacaatcataaaattttgctctgttgcccacttcaattgctcttcaagtatttcaccgtatggcggacgtataaacttcggtgcataaccagctaaacgatttaatatttcttccgtttttattatttgattacgatactcagcatcatttactttcgctaagttcggatgactatacgtatgattaccaattacatgcccttcatttgcaatacgctttactacgttcggaaatttttctgcgttttcaccaagtaagaaaaaagtagcttttacattatgttgttttaacttatctaatatttttggcgtgaattctaaatctggtccatcatcaaatgtaagagcgacttccgctttattatacggtcctgaaaatgcgtacgcatatttttcgacccacgaaaatggtgtccacgatccacgctcatatgctttcatttgtacttcatagttttgagggatatatgcgtatggcaatgaacttatatagtctccataataaaatgagttatatggcatataagcatacgaaacatctcgttctagtccccattgatatggagcaaacatttgtggcgaataaaaataatacatgataaaaaaacctccctaatttttcatatgtgattcctctgcactttgttagagaaattgttattcataaacaaaaaataagactgtccttaattaggacagtcttgctgctttatattattaatacatcgatgtactatctttcggcaaagctttcacatgttttaaatagttcgtcactttatcatcctcatcttgcggatattgatattcatatgtgttagcgatttcgttcgccacttccctaaataaatcacccatgacaaagaatgactcccatatgttttcatattctgcattagaaaatgtccttttaaattgctcccacatatcttcttcaatatattgctcgaaatgctttccaaacttccctgtattaactgtaaagtctgttttcataccaatatgccattctagcattacgatgaacatatctcgcactggtccttcaagcattccttttgcataagaaagctcttctctccatagcccttttgccacattcgtactacaccaccaaaattcattacagcaatccaaaaactctttttctgtaggcttttttattaagtaatctttatcgcttgctggcgggaatccttccatacaattatctttatcaagaagcagtttacttaaactatcttgtccaacgaacttttttattaactcaactggaactagcgttaaatcaatccgattcccatccatgaactgcattaaatatggaaacttcccatcttcatctggttgaactaacgacatttcttctggcatttgtactatcattatttctccaaatctatgaacccaattatgattagacgtaaaagattgtatatcatttacaacatacataatatcatagtcttgaaaacaatctcttttcacatttggatttacacgcgatccattcatgataactgctcgaattctttcatcctcttttgctatatttataattacgtctaacatttctttttcagttctcatctacttatatcctccaattttttaatatataatatagtgttatgtatattggaggtccacgagctaatctcgttatacacgatacatgttataatttttgaaacttctttttcatccctttttcctccttacatcactcttttacaactgccatccctttcaatttcccaatgctttctaccattcacttttaattataccgaaaattctgtctcgaatacaaaaaataaagaagggacatctaccccttacagaatagatatcccttcttttaaagttaaatttaattcctatggattagtagaccaaagcccagcagatttaataaatgtacgtttatttaatttcagctgcgctacgataaattctgcaatatcttctgcttgcattactttatcagggtttccatcagttaatcctaaatctacagccatatcagttgctactgtacttggagttaaagctgttacacgaatgttatgtttgcgaacttccatcgctaacgattctgttaagccaaggacaccaaatttagaagcactatatgcacttgttacaggtgcacctttttgtcctgctgtagatgaaatgttaatgatatcaccagattgttgttcaatcatgctcggtaaagctgcacgagttgcatagtatacacccattaagtttacttgaatgattttttcccaatcagcaacgtctagttctaaaaacttaccgaatttagaaataccagcgttattaattaaaatatcgatagatcctaaaccattttttaacgtttcaatcgcagttgttacttcttcgcatgaagaaacatcagcagttgcgataacagcttttacaccttctgcttctacttcttttgctacagcttttaagttttcttctgaacgagctaataagcctacatttacgccttctttcgctaatgcgattgctacagcgcgaccaatccctctacctgctcctgtaattaaagcatttttaccttgtaataattctgccaagtataacactccttaatcatctcagttatgtattatattaaaattgtatctatgtttatgtaaaaaggcaatgatgcactttcatgtgcgtaggttacttgtaggtaactatagaaagtttttatttataagtttcatttttttaccattattcatgtaaaataaaaacaaatccagcataggggagtgtatgagtatgaaaagcgaaggaaaagcttttcaatataattgcagtaacagtaaatgcatttttaaagagaaatagtgttagaaggttctccttctaacactatttctcttcatgattcggcatacgcacaataaattcagtaccttttccttcctcactctccacttttatctctccttgatgaaggtcaagtactttctttacaatagctaaacctaagccacttcctccataggcacgatttcgtgaagaatccgctttataaaaacgctcaaaaatatgttgtttctgttcttctgatataccaattcctgaatcacggatacgcacttccactactgtctcatgttcctttaactgaatagtaatcgtaccaccgcttggagtaaatttaatactattatgaattaaattaatccacacttgactcatactttcttggtcagcaataacatatactttttctaaatctagttctaactcaatttctttttcagcccagagtggttcactatttaacacaatttgctttaattgttgatctaatcgatagctcactctttctggtgtatactcttctgattctaaaagagttagctttagtaaattttgacttagtttagataatctcgttgtttcagtttcaataatggtaagataatgctttcttttttcctcagaaagattatcgtcttgtagtgctctagcaaatccttttatagaagttaacggtgactgtatttcatgagaaacattcgatacaaactcttgtctcattttctccatcgtattcagttcatctgtcatatcatttatactttttacgagcacgccaatttcaccatcatacttttcttcatttcttatttttacggagaagtctccttttgcaattttttgtatcggttcaataatagtccaaatcatcgcctctcgttttggtctcattaatattccaatcaatgtccaaataagaataataaagacaaaaccgaccatatcactaattagaaaagcaacaaacggcgatacgtttacgtcaaaagcattcaatatactagttgctacataaaatgcgatagaccaaattatagtaagaaaagaaaagagcgctaataccgctccaaatactttcagcatcttcaacttactcattcgttttctttttctcatttacttacctctaagcgataccctaatcctcttattgttttaatactaaatttcgactgctcttcttgaaacttctcacgtaaccgattaatatgaacgtctagtgtacgttcattcccttcaaaatcatatccccatatttcttcaattaattgctctctcgaacaagttcttcccgatttagaccctaaagtaaagagcagctcaaattcttttaacggtaatgtaaccgtttgttctccagatgtaacttcgaatgttttacgatttaataatacatttccaacttgaatcgattgggaaactgtaatttggtaacgtttcaataatgcctttactctcactactaattctatagggtcaaatggttttacaagataatcatctgtcccaaggtgaaatccttttactttttgtgatgtttcccctttggcagttagcatcagaaccgggatatcatagtattttcttaattcaaaacatacatcaaatccatccatatttggcatcatgatatcaagaataaccatatcgacttttacgtcatccattttctgaagtgcatctactccatcaattgcctcatatgtttgaaaaccttctcgttctaaaaatacagaaacgagttctctaatgtgtggatcgtcatctactattaaaattttaggtatcaaaggaaccatttcctttctacttagcatctaatatattgtttaaaaatgaatcatcagtggagtaaaatcccactgatgattcattttataatgcaccctctttaattttcaattgctgcgttgcaaactcacgatacatatcatgcgtctgtaataattcatcatgcgtaccactacctgtaagattccctttttcaataaagacaattttatctgcatctacaacagtagaaagtctatgcgcaatcactaacgttgttctgcctttcattaagttatttaacgctttttgaacgacagactcagatttactatctaagcttgaagtcgcctcatctagcataagaatttgcggatttcgaagtaacgctcgggcaatggcaattcgctgtctttgtcccccagaaagcttcacaccgcgttctccaacttctgttgcataaccgtttggtaagtcatgaataaatgcatcaacatatgccattgctgctactttttcaatttcttcatccgttacttcgccctcgacgccataacaaatattatcacgaattgttccatcaattaacggactatcttgtgatacgtaaccgatttgacgtcgccatgactgtaatgaataactcgtaattgattcttcccctaatttaatggcgccactagttggctcataaaaacgttccaataatgagaataaagttgttttcccactaccacttggtcctacaatcgctgtcacttttccagattcaattgtgaaatcaatatttttcaaaacttgctcttcttcgttatactcaaaatgtacattttcaagaacgatcggttgcttagcatttgtcactttcacaccagtttcatgatcttctacttcatattctaaaatcgtactaattctttccgttgcaccaattgccttttggaattgtgtaaagaacatagataattgactcattggcattacaatttgaactaaatacaaaataaacgctacaagttcaccggttgttaatgcaccgctagaaactcgcatcccgccataccctacgataataacaagtagtgccattaaaacaaacgacataactggcgaaattaatgcttgcacttttccttctttcaaaccaaattgtaataacttttgtatacctgtattacccgtttcatattctctcttttctgtatttgaagatttcactaaacgaatttctgataacacttgcgttaacacacttgtaaaagatgcagtttcatcttgaagtgcttttgaaatcttatacatttttcgtccaagtggaactaaaattaacacagacaacggaataaccgttaaaagtaacgcagtcattttccaatctaaaacaaataatacaattaacgatccaacaattgaaataccacctgttaataagtttgacaaatgctcagaaattaacgttttcacaacacctgtatcattcgtcatacggctaatcgtatcacctgttctattttgatcgtaataagataccggcaagataagtacctttttccacaaacgttctcttagtcccgctacaatcttctgcccaatataatttagtaaatatatagacaaccctgccgcaatagtttgcattacaaagaaagcaattaacccaacaatttgtcctgcactaattgaagaaagcgaaaaattatctactaatccttttgtcagcataggaataaataaactcgctcccgtagaaagcaaactcattaacaacgcaaaaactaaaattcctttcggaggatttgtatcttgaataaggcgtaaaaactgcctccaactcccttttttctttatttcatttctaacttccattcctgttcatctcctcatgttaaacaaaactgttctttctaaaattagaatacgatacaaatgtaaactgaatgtaaacacactttttctatttttacaaaatatacataaaaactcatctttacaacagatataaacatctgatattattacctggtacttaatattattctatgtaaattatagataaataatttaaaacacgatataaatctccagttagtgaaaggagtatcctttttgcaaacaaatatacattctgaaaaggaaacaattatttttattcatggattagttggcaatcgtcgcgccttcaaaaaagagcaaaaacgattttctgcctcctacaacattataacttatgacttattaggtcacggtgatgataaaggagaagcaatcgacttttcattacagcgcctcgtagatcaattattaaacttatatgaacaagaaggtattaaaaaagcacatatttgtgcgctaagttacggctgttacatctctacaatttttgcacaaatgcatccagaaaaggtattaagtatttgtcatattggaggacattacaataacccttctcgtttatataatgtatttcaaaatttttgggagaagcgaggagatgaatactctaaatggctctctcaatacgcaaatactatttttccaagcggtatattaaaagcaaatccgttcgcagtcatttcaagaaatatttactaccgtttcggattacaattacattcatccataattgcccagtcattacgacatcggttagaattcgatttaaaatctaaattaaaatcacttcctcaccctatactatgggtaatgggagagcatgatcatctctataaatcttgtctatttgatttgaaatctattttgcctaacgttctatataaggaaataccgttagcgggacatgcagcgaacttatttcgtcctaactatttccatgacttatatgatcgatttttaaatggaaagttaaaataaaaactattaaacttccaatttattcaactataaaaaggcttcccaagtttccttggaaagccttttctctatacgaaaagtatataaaactactttttcttagtatgcttttgtgtaacctaataggtgcttgctccagtaagagttacttacagaactaatacgtacaccagttgcatctgtttctgcactaatgaactgaccgtttcctaagtaaacacccatgtgagaaggacctgatttataagtattttggaagtatactaaatcacctggttgtggattgctagtttttgttttagagctccagtatccagcaactgtttgacgagcgcctttatgaccagtttgatttaatacgtagtgaatgaatccactgcagtcaaaaccagcaggtgttgtaccagcagttctgtatggtgaaccatttaaagatctagcgaatccagcgattgaagatgtatctccacctgttgttggtttttgtacgtctttacctggttgttgaacgttatttgtaacattattgttatttgtaacgttgtttactccgccttttacaaacttaacgaagtctgcacttacgtaacctgtgcggccgttatggttaattttgtaccaaccattttcagcaccagtaacgtttaatactttaccatttgttactccaccgattacagcgttgtatgtagctgggcctgtacgtacttttaaagcaccagtgttaacaacataagaaccaccagtttgaactgttgtagtattgttgtttgtagttggttgttgtgtttcgttagatacagcagaaccaccttttgttacgaagtctttgcttacgtatccagttccaccattgaagttgattttaaaccaatcttgtacttcacctacaacttgtactgttttacctttgtttacagaacctaatactgtatgagatgtacttgggcctgtacgtacgttaagtgaagaaacgtttactgtgtaagtacctgttccttgttgaacagtcgttcctgttttgccaccagtcgttacgaagtcaccacttacataacctgtttgaccatttacgtttactttgaaccaaccattttcttgtccaactacttgtagcacttggcctgattttactttagaaataacgttatgtcctgtaccagcacctgaacgaacatttaatacatcagcagttactgtgtattttaattcagaagttgtttctacagtttttgtttcagttacagtcgtttgagtttgagtttgtccattaatttcttttagcgcttcatttgaaacttgtgcatgagcagaatccattcctggaactgcaacgccagctacagaagctgctgctaaacctgcaattacttttttcataagttgtctttacttcctttccctactatcctcttaaaaaaaactaaaactttaatactttacaatattatcaaagtaaaatattcatccagttccattttttagcaagagttttatttttcacacagagttcattttaaatgaacaaagtgaaatccgtgtgaacttcatgtgaactttatcattaaacacagtgtttttgcaatggttttttcaaatttcttatatatcgcatgaaaattcgacattctatttaatattttaatataaaatatcccttttctatctattataaaaaattctattaacctaatacaaactcaagtatgtatttccttataaagctccttacatgaagtatactttcatcatgacaaaaatcactctatttatcaatagtataatatttttagaaaactaaatttctatactatctacaattttgaaataatttgacgaattgtaagatttatttcacaaaagccatttctcctttaaagaaaacacacactatatcaactgttctctttttcttataatggaatttataggatatttataggatatttatagtattatatacatatcttaataaacaagaattttagcgaattaattaaagtttcattcccttataaaatgaaactttaatcaggaagggttttatacatcctccgctaattattaaccctcaccactcgggctgcccattaatgcggagttttattggaataaaaagaggaggcatatttgtgagaaatataatagatgatccaatacaaaaaaacatagagctatactatgcttttattcaattcgtttcaatgataacattacaaaaagtatcagctattgaaacacgtaaaaacgaattaaaaaatcagatgaaaaatgccggacaaaaaaacccttattacgtataaaaaaaggtgaacaggttatattcctgttcacctttttaaattatttataaattttcacacggtcctctagcggttggaattctttttcaccagcatgtactaccggtttaccaaatggcatttgtgcaataagtttccaattctctggaacatcccactcttttctcacttcttcatcaattagcggattgtaatgctgtaacgtagcaccaaacccttcaatttctaaagctgtccaaattgcaaattgtaacattcctgatgattgctgagaccaagttgggaaattatctttatataatgcaaagttagcttgaaggctttccactacttcactgtcttcaaaatataaaaccgttccataaccacttttaaatgcattcattttttcttcagtaggtgcaaagttattttcaggtacaatttttcgtaacgtttctttcgtaatatcccataatttatcatgttgttctcctaataaaacaacaacgcgagcactttgagaattaaaagctgaaggtgtatgttttacagcatgataaatcacttcttgaattttctcatcagaaactacttgctctttactaattgcataaatagatcttctgtcttcaattgctgagtaaaaatcttttgccatcataattccctccaattttcaattgaggctattttatatgtatatatcatattacgcccctcaaacttattattaataagcttataactttataatatcacagcaacaaacaaactcaaataataacacttatatttagaagctttttcctttttaaaataaaaagactgtttgttgttatctaaaattagtaacaacaaacagtcttacttatgtagcgatctagattcgtattttacttacttaattaactaatccaaatgcatacgacattaacttatttgtctctgtaaaacgttttgttttactggatgtccccatgaccactgtaataattcgattatcaccttgctttgcagtcccagtaaaacagtatcctgcactatctgtaaatccagtctttagtccgtccattccttctatatataaacttttattatttttgtttaacatgtcgtttgtgcttataacattaatattattaaatgctagctgactttggcgtaagtgagtcacttctaatatttccggataatcttttataagatgatacgccaattgtgctacatcaccagccgtcatttttgtttcacttccatctggctcttgtaatccagaagcatttgcaaatttagcatgttccgacatttttaactgtttcgcttttgcatccataagctgaacgaaatctttctccgattttgccatatgttctgctaaagccacagccgaattattagctgactcaatcattaatgcatgatataaatctttaacagttaatgtgtcattaacttgtactgggattctcgctccttctgtttgtgccgccttcgcactcatttttactggatcttcccagcgaactttcccgttatgtatactctctagtaagagatacgctgtcatcatcttagacatactagccggtgcaaaagcttcattttcattatattgataaataatatctccatcactcgcatcgataatcatagctgcttttgcgttaatttctggtgggatgtactttggcgggactacttttttagtaaatcctgctttaggtagttctgccacttgcaaaggttgtccctctacattcgctatgctcttttgatttccttggaataagaaccaacatatccctaaaataataactaataggactgtcatccttccccattttaaccgattcatttcaaaactcctttagcaaaccttttatacactcacatttaaccttaacaacaattcctttatatagtcaaggtaaaaggtatatttattcatatacagcaatgattattttaatttatttatgttaaacttacaatattgaaacgtaagaatattcaataataaaatctcgtaaataaagcgaaactttaatcagccccaccaattgggctacccgtcaaatagcgagataaactatttaatagaagggattcatacaaatgctacttccaaaatcattaaaatacggagacacagttgggatctactccccttcttcaccagtaacctacacttctccaaaaagatttgaacgagcaaaatcttacttacaacagaaagggtttcatatattagaaggttcattaacaggtcgatatgatttttatcgttctggtagtatacaagagcgtgctgaggaactaaatgtcttgataagaaatcctaatgtttcttgtattatgtcaacaattggtgggatgaattcaaattcaatattaccttatattgattatgatgcttttctaaagaaccctaaaataatgattgggtattcagatgcaactgctttattactaggaatttacgccaaaacaggaatccctacattttatggaccagctctcgtcccttcctttggcgaatttgaaccttttgttgattgcacatacaaatattttgctgaaactttactacatgatcattctcttccttatcatataaaacaaccattattttggtcagatgaatttattaattgggaagaaaagacgaaggagaaagaacttcgaccaaacgattggatttcagtaattgatggaaaagctactgggcgtattattggcgggaatttaaacacgatacaaggaattttgggtagcccctatatgccacatattcaagaaggcgacattctctttattgaggacagttcaaaagatgcagctactattgaaagaagcttttcattacttaaaattaacggtgtattcgataaaatttcaggtatcattcttggaaaacacgagcaatttgatgattgtggtaccaaccgaaaaccttttgaaatactattagaagtacttcaaaatcaaagaattccttttctagctgacttcgattgttgtcatacacatcccatgattaccatacctatcggtgttcaagtagagttggatgcaacaaataaaacgatacatattgtagaaccttggaaaaaatgaattcatagatagcttctattgttttacaataaaagccatgatactatataatttggaatgtgaaaggttaaacaaaatacgttccaatatatatcattagaaaaattaggtataaatatatatttatatgcaaaagagagtgaataaatgaaaccaactattaaaaattacgtatttttacatgtagcttttttgatatattctatcattatggtttacatgaaatgggcagctaaattccccattgcttccatctcattttttgttgcttatttcggactagttatacttttattcggatatgcaattttatggcaacaagtaattaaacatttcgaaatttcaaaagcatattcacatcgcggaattattatactgtggtcaatgctttggtcagtatttctatttggagatactattcagtggaatcatttacttggtgcagctattattatcgtcgggattgtggtggtgacaaaagatgaatagttatatgttattatttattttcgggataattttagctaattactcacaaatattattaaaaaaagctactttgcaacaatacgattctagaataaaagaatatgtgaatccttatgttattatcggctactctttatttgtaattaacgccggattaaatgttatcgccatgaagggcatggcattaaaacaagcatcagcattagaatccttaagttatatcatcatattaatttttggttggtatttcctaggagaaaaaataacgaaacgtaaactcatcggcaacatgattattatcgttggtgtaatcgtttattgtatccaatagtaaaaagctccgtttatcacaaacggagctttttactattgacctaaattttgcactttatctttcaaatctcgaacttgatctaccgtctgcataagctcagagtttttaaattgctctacatccactttgccttcttctatctttgtcttcgccgtatcaattaacgtatttaacttttcgttatatccgacgatttgttgatgaagatcctttgctacatcaggtggcgttaattcattgaatgcgggtatatcttgtttaatttcactaagcttcgtttctaattcttttcgagcctcgctatcattaacggccttttctgctaatgctggtgcatcatttgcaaatgcacttatttcatttacatagtctgtcgccttttgagcataatctatggagttctttccttcttccactattgaacatcccattaaaccaattgaaactatgaatactaatacaattgattttattttcattttagacccccttcgtccttataattgtctgtaattttctctatacataacttctagctaaattgtttatagcctttttcaaatagctatttaccctcttacatgccctattatcgttacaacatctatttctatatgcacgcttataatatcttcaattatatccatatacccttgtcctatagctgttccatagtgtaatgtaagccccttcttttcatacactgactttggcactgaaaaaataaatctcctcaaatttctttcatcagctggttccataattaaaacaatcccatcctcatcaaacatatacgctcgccctccaactttacattcactatggctcagtattgccttggtcagcaaaatttaaaacataataagttaagatacactctgctctatcataaagtgaaactttaattagccctcaccagtcgactctttatcggcaaatagcgggataaaaataaaaagcattcattcttttttgttaagaataaatgctttttaaaaaatcaatttctaactctaacatctttttttgacgaggttttactttccttacgggaactccagcgtaaatataccaatcatctaaactctcttttaccatactcatcgcgccgactgccgtaccttctcctacaattacatttggaaaaataatagaattagcaccaataatcacatgtttttttaaaataactttttctgctttcacattcctatattgattcgggacggttggccccattaatgtatttccactgaaatcatcaagtactgcatatacgattgttttagctgagatgtttgcaaaatcatgcatttcaatcccaacttcccctccatataacgctgtatacgctgatatgtgcgaataacttccaattgtgattttaccacttaaaatgcaaaaatcatcaattcttacatgattgccaactgatatagcactcggattatatatacttgcttttttactaaccaatacatttttcccaacagataaaaatccaattttctttagttcttcttgactataaaaactattcatctaccgacaccaccttctgctctaaacagattacaatttgctctactagttctttcgtcatcccttcccataaaggtaaacttacgattcgttttgctattttattcgtttttgttaaatctgtcgacttatagtttttaaaaagaacttgttggtggcaagatggtgaaaagtataatctagcttctattttctgttttttcagttcttcaattacttgtatgttgcgaacttcttctggacaaatgataggcataaattggtgaataactgcttctgtcttttggactttccacccttttttcattaacccagtattttgtaacaactgtttataccattcagaaatacgggtacgttcttttaatttttgatcccacttttttatagtcgcaatcccaatagctgctgcgtattcagacattttacaattaaaccccatcatcgtacattcacgatttttatcaaatccgaaattccccattcttttaatacgttgtatatcttcttcgtttttactatatatgagccctccttcaccaattccgaatggctttgttgcatgaaagctatatacgatcattccactaaaatcttgaccgtaatgcatccctccattcattaatccaaatcccggcgccgcatctacgacaaccggaatccccttcttctctaattcttcatattcttctaagttcatccatgatccaaaagtggcgtacgggacaacaatcgcaacctcttcttttaattcttctatcttatccaaaagtacggttttatccatataccaatcatctattgaaatatcaataaagtaaggttccaatccacaccaaatagcggctaaggcagtcgcagggaatgtaaagctaggcatgagagcatactttccctttcttcttttctttagttgaatagccgccattaaccctaacgttgcgtttgctactgttgtaacagctcccctgttttgaaaaaatgacgacataattgtttcctcaaaacgttgatttataggtccataattcgtatatatgtgagatgtatcaatttccttcaattcgtccaaatactcacttacaggtacagttgaagcacgtaaaaaaggaatattctccatatctattccttcctatcattttcggacaatatagagcatatctgtttcagataatccaaatttcctagcacttttcattccttgtttttccgctatgttatataattctaccttaaatcctgcattcattaatcgttgaataaatcccgattgattgtaaattctcacatgatcttcttgaccaaaagctaatttcctcaattgtggtgttacaattaattcattctctataataaaatctacattcattacgattggtacttgaataattccccatccatttggctttaacactctatataactctcgcattgctttgtcatcatcaggaacgtgttctaatacatggctacataatattacatcaaaagtattactatcatatgtaattcttgtaacatcaatttccttcattaatggatcctttggttctaagtcaccacatacatacgtaatatttttatactcgttaaaccaatctcttaactttgcttcaggtgcaatatgaagcattgtatagtttctatttaacaagtccgtttccgtttcaatgtacgcacggtacaatctttcacgatccatcgaattacaaactggacatatccctgtatctttattccacatttcaaatttatatttcggaaaatcataatgtgctggccaaggtgaaaatttttcaaattgttgattgcaatattgacaataacaacattctttctcgaacatatgagcaactaacttgtttaagcctttttttatcttttcattataaatttgatctagttcgccatttcttactgcatccttaactataaatcccgcattttctaaacaataagataaactctctttatactcactttcggagcttaaaaacccactattatatgcatctataattaattcaatccactcttcaattgtcattaaaataaaatgcatttgtttttgattttgtccactatgctgtctaaaataactaagaggttcatgtatataaactacttttcctttcctcatcatatctagccaagttgcaatgtcattaatagcagaataagcctttcctttaaaatatccaaacttcccgtcaaacaaattccgattaaacaaaacagttgtcggctcaccaactacatttttcaagttttttaacatataattccctaattcttttccttcaaaaagtgtagtttctttcgcgattttcatatttaatgttgaaggtagtaatatctctccattctcatcaatcagttcacgatatgacgtcacaaatgaaatattttctaacgccaaaaagtatttcatcattctctcgatcttttcatgatgaaataaatcatcatctaataaaaagtttatatagtccccattcgcaagttctacacacttattaaagttttcggcaactaacggcgtttcattttttacatatgtaatacactcatattcacgtaagtacggttgaatcatagcattgacttcattatttgtactgtcgtcagaaataataatttcaatattttcatatgtttgattcaaagcgctgttgagtgctaattccaagtaataaggtctattgtatgcaggaataagtatacttactttcggtaaagaagaattattatttatatgttgttttttcttttctatgtttattttcttcgctctaattttttggcaatagtctaatgtatataatattgatgatggaactatccttcttgcataatctagaaaattagttatcgctttatctaactctttttcagtggataagaaaccatattgttctcctgctataatactgtgtgaaaaatcttctaacccatccatcattttattagattcatttaactgttgatctggatgtaatcgaaagtaactaagtgtctctgctatatatacagcttttcctttacttaataaagataaccatgaagctatatctacgttacataaataccgcctcttatcaaaaatcccaaacggttcttgtaaatcatttttacgaaataaaactgttgtcggttctccaatataatttttttgatccacaattaccttatttcctaattctgttcccgctataatggtatcctcttcaaataaacggacagtcgaataaatatgtcgtagctctttccctttatcatcaatgacttgacgatgagatgttacaagcttaatttcattatctaaatcatcgaaaaaatacttcatcattttttcaattttattcacatgaaatacatcatcatccattaaaaaatttatatattcaccgttcgcttcattaaataacattagcgcattttcaaattgtccgagagttgatctattttttatataaataatatttgaatgatcacataagtatttttgtaacactttttctgtttcatcattcgtgctgtcatctccaactataatttctatattagggtacgtttgttctaacacactacatagcgccttttcaaagtaacgaggacgattatacgtaggaattaatacacttaccaacggaagttgctctaccacctcttcagttctttcaatacgagttctcattttaactctctcacctcttcgcatattatttatatacgcgacacaaaaatcacattactttaactgtatggagcctatatacttttatgcaaacatgaaacaaattatcatacttttcgttcctgaataaacatatttaataatgcggacattttatttgcaccttttttattcatatgatcactatcataaaaatcatcgtcacaaaataatggcgaatcaaatagatctatgatttgaaaagaatattgagtttgaaaatcatttataactttataaaaatcttcttttaattttttactactacaattgaaataatgtgaagtaacagggaacacaacaattagtggctttatatcattttttaacagtaaatctaaatattttttaaaaatcattttattttcaactaaagtatgagggtacgacaatttagcatgtgaagctgctcttattttcccgtgttcttcaaaaggaatgtgaagaggagtggtattccactcagcatttatccaaggcagtatcaatgattcatcttttagttcatctaataaaatatattcaaaatgcaaatttaaaatagaaagaagtggtttcggagtatttagatgtgagaatccatcagtgggtagaggagagtgaactacagtatgatgaccatcttgaaacaatggataatatactttgtgaattctatatgattcggaggataacgacatatcaaagtaaaacgagaaataggctattcctattaaacaatattgaaatgaatgattgtttgataaaagttgtgacgctattaaataatcatagtatagatcttgcgatggaagtgttaattttattgacttttttgagagaagctccgtacttatgccacaatgcggataagacaaaccggtagcaaacaattcatacgtcggatcactctttgcttttttcatagaaatgtataaagacataagatccggatttatttgatagatagaaattaatttatccttccattcatacatgtattttgttaaattaataatttttgaactttgcacgcccctatttatcaagtcatttgtaagtttttctgcgtcccctctccaaatgactatatattgaaaagaactttctatacgaacaacatctgaaacgtccacaacatgaactattgttttacatttatttttgtctaacgtatttcgaatcctatcccctgataattcatcacttaaaacaatgattttatattgttccttcatgtacatcccctccattatatgtataatatgaaattcatttttaattcgtaacaatcatatacacctgcaatctaacaaaaaaaatagctccaccattaggcgtagctatttttacaattattgcttattcaaattatattcctttatctaactcataaagtttacgatacttttcattttctttcagaagttgtttatgactaccttgcatgacaatttggccacgatcaaggaatataacttcgtctacatgttctattcctacaagatggtgcgtaatccaaataaccgtcttttcttccgttgcagaaaacattgtttcaattaaagacaattctgtttttggatctaaaccgatagtcggttcatcaagtacaataattggtgtttcttgcataagagttctagcaaaagcaaccctttgtctttccccaccagaaaaccgctttcccatttcatgcatttttgtttgtaatccgtctggaagagaagtaacatgtgaagctaattgtgctttctctaaagctttccatatctcttcatccgtcgcctctggtttgccaattcgtacattatttccaattgtcgtatcaaacaaatgcggcttttgatttaatacagaaatatatttagataaaagattcgtatgagctcgttcaccatttagtacaacttggccatttactgggcttaacgcccctgttaacaattttagtaaagtagatttccctgtcccacttctccctaaaatagcaattttcttccctgtttttatttgtaatgatacatcttttaatacaatctcattactatctggataactatacgatacgtgattcagttcaatatctacatgttttggttcaatataatctttctctccatgcaaatccgtttcatcatgtaaaacactatcactttctacgccattaagacgatgggtagattctacatacgacggtattcgatcgatggcatctgcaataggaataagcgcgttcgttacagataaagtcattaatacgaaagctgcgataactgtaggagcaatttgttcacttgccgcttcattcccagtccatatgatcatcgaaataactacaatacctactactaattgaatgatactgtcccgaatatgataccagcgtttcactctcttttcgatttttaacaactgatcattttgttttacatactcattaataaattcatctttacgaccacttgcttgccaatcagataatccaaaaacagcatctgtcagttgttgatacaaacggtttcttccttgctttaaagtaacatgatgtttcttcatcaaaagtaatgatacaaacggaagaagaaaaacgataatagctaacatacaacctacaataagtgcaaaaacaaaatcaaatgcaccgataacaagtacgaagatactataaacaactagcgctaatatgctaggaaatattgtacgtaaatataggttttgcaaatgctctatatcttcggataacactcctaacatatcacccgtttgaaatcgagaacggaaaaataacgcctgtggttctactattctatatagcctcgttctcattttttctaatatacgtagtacgacatcatgtccgactaagcgctctatataatgaaatacagcttgccctatactaaacgctcttgttgcaacaataggaacatatacagccattacattttctggtctaagggcagattttgagattaaataacctgaaataaaaagtaacatcgctcctgaactaactccaagaagaccaaggaaaatagttaaagtcattctacctttattttgttttatataaggtttaacccagttactcatttctctcccctctcttccctatgaaaatgtaatgtctcattctctaaaagttcttcatacgtcccactttctttcatttcccctttatttaaaataagaatatggtccatttgtttcatccaatgtagacggtgggttgctaaaaatactaactttccattaaatagacgtaacatcgcttgctttatttcaaattcggtttcaatatcaagatgtgccgtaggctcatctaataaaatgattggttttttacttaaaagcgcacgcgccatagcaacacgctgttcttgtccgccacttagcatacgtccaccttctccaattctttcgtgcatcccatttggaagtgatgtaacgagtgaacgaaggccgacttcattaataactctttcaacttcttcatctgttgcatttgtttcataaaaacgaatgttatcctttaatgaaagcggaaaaatataaggttgctgcggaatataagcgatatttttttgccaatcttcacgagtagatccatcaacttctacaccatttactaacatctttccactcgaaggagataaaaaacctgctaatacgtcgattaacgtcgatttgcctgcaccactttcaccaataacaccaatagcaccgttaccttcccaagtaaaattaattccttctaatatagccttttcagattcagtattattaactttgatgtcttgtaatttcaagctactagaggcattccatactatatcttcatttaaatctttcttttgtattcctttttgttgttgcaaaatctcttctatttgctccatcgcaatttgtccatctaatgtcgcatgataatttgctcccacttgtttaatcggcagaaaatattccggagctaaaatcaaaattgtaagggctggtaatagtataatcgttccatctattaaacgtatccctaatccaactgccacaaacgcaattgataaactcgtaaagaaatctaatgcaaaagaagaaagaaaagcaactcgcaaagtacgcatcgttgcttttctataccttttacttactttttcaatctttccttcgtgctgttcacttttccctaaatactttaatgtttctaaaccttttaacgtatctacaaaatggttcgaaagtacacgatatatctcgtactgactatctgccattttttgcgctgccaatccgagaagaatcataaatatgatcacgataggaatcgttacaactaaaatgattccagactcaatatctagcgtaaaaacgtatagtacaattagacctggaacgatgctacttctaatcattttaggaatcgttaattcaatatatgttttaaatttctcaatcccttcaattgataaggtaaccagatgaccagttccaacagtttgaacataccttggacctaatgtgaaatatgcctctattagttgttttcttagtaacgaccctgttttttcagcaaaacgttccactaatatttgtgatgttcgaactactatgtgacgcgctgcaaacgcgataccaaaataaacaatttcacttaatattgtttgtactgtctctccatgaaataaaaacgtaatagctcgtgctaaaaagattgtttgcgcaataatactaaaagcttctaaaatactaataatcgttaacgctacatataaaatacggctaccgggataagacggaagtcctctttttcttttcattagtactccaaatcgttgtctgacttaacaggttgtctaaatacataataactccatatttgacttccgataacgaaaggcaaaatagcaatcgcaaagtaagtcataagttttaatgcataagctcctgatgctgcgttgtaaattgtcaaatcattcattgctcctaaagagctaatcataacacgtgggaacataccgataaatacactcgcacttagtaaaatgattgttaaactcgtcataaagaaagcccaaccatctcttcttcttttatttaataaagtggacactaatagtgctacaaaagctccgattggcaccataatccattctgttccatgagcagtgaaaatgtcggttttccataaccccacaccagcaaaaacaagaagtgtaattaatgaaattggtgcaatttttattgcagcaattcgtgcacgttctctcaatttaccagttgtacgtatcgtaagaaattgtaatccgtgaacaatacatagtaggagaaacattactcctccaagtaacgcaaatggatgaagtaattgcaagaatccacctacaacatttttactctcatcaataggtacacctaccataaagtttgcaatcgcaactccccaaaggataggaggtaacatacttccaataaacatcccccaatcccatgcactcttccatttatgattatctattttcgcacgaaatttaaaggaaacacctcttaaaattaaagcaagaagcataaatacaaatggaatataaaaaccactaaataaagttgcataccagtgcggaaatgccgcaaacatggctccaccagcacaaacaagccatacttcattcgcgtgccagaacggtcctattgtatttaagtaaactcgtttttcaaaatcattctttcctaaaaacctcgaaaccattcctaccccaaagtcgaaaccttccagtacgaagaatccaacaaacaagattgcaataactaaaaaccataactcattaagagataacatactcttcctccttatcaaatggatcatggctttgataatcctttttcgttttcttattcttgtggcccttaatggtacgaacaaataagtacacacaaattccacccataattaaatacattgatgtgaatgaaataagtgagaataatacttcaccgaatgttacatttggtgatacagcatcttctgttttcattacaccaaatacaacccaaggttgacgacccatttcagtcataatccaccctactgtattaccgatgaatggaagagaaattgcatacaccattaattttaaataccacgttttttccgctaaacgatcttttcttgataagaaccatccgtaagctcctagaagaagcatgaatgttccactcattaccatcgctctaaaactccaaaacattgtatgcactggaggaatataatctccaggtccatatttttcctcatattgtttttgaatttgattcatcccttcaacttgaccgctaaacttatcatacgataatagacttagcatataagggatttgaatttcaaacgaattttctttcttctctgtatcaattttcgaaaatactgtaaatggtgctggatcctcacttgtattccatagcgcttcagctgccgccatcttcattggatgtgtcttaattaattgttgcgcttgtgcatgaccgaagaataatacaagcgccgttgtaattgttccaacaatgatagaaattcggaaagattttttaaatactacagtttcttgtccttttgtaattttccatgcacttacaccagcaataaagaatgcacctgttgcaattgccgctgtaattgtatgcgggaattgtacccatagttgtgggttttgaataatggctaagaaatcattcatttgcgcacgaccatcagctgccatttcatacccgacaggtgactgcataaatgcacttgcagttaaaatccagaatgctgataacatcgttccaattgaaaggagccaaatacacattaagtgaattcgcttcggtaatttatcctcaccgaatacccataaacccaggaatgtagactcaatgaaaaatgccagtaatccttcaatcgcaagtgatggaccaaatacatcacctacaaaacgtgaatacgttgaccagttcataccaaactgaaattcttgtaaaatacctgttactacacctactgcaaagttaataaggaataattgcgtccaaaactttgccatcttcttatatacttcttgcccttttaccacatacaacgtttgcatgatcgcaataataaaagctaaaccaattgacagcggaacaaaaaagtaatggaaaatcgttgttgatgcgaactgtattcgtgccaattcgagcgtttccatactaaaatcacttccttcatagtttttataataaaagttaattgagcaatcttatcaaactcaattattaagaaatacgaaaagacaaaaacattttgtatgtattgtcgaaaaatatgaagtttcagtttttcaaactattgtaatgctattttttaccttttcactatttctgtagtgttttattcgttaatcgaattgtataatatacctgcatagtaaattcaggttatttttgacgtattattgacatcattttgtctgaaatatgtcttttgtcatttttttgaatcagatttttctcattagcaaaatgtgttttttcaatatacttcttacttttatatctataaaacaatcgtttttctcttcatacacttgactttcacccgaaaaaatgtcctcggaactaccctcgataaacgcttgttttttgtcaagagaaaaatgtatttttaaaattcaaactcgaaataatgttattcaaaaatagaaaataacttccctcttcctcgactaaaagttcatttttttgtcatttttccagaacaaataaaaaaaactgaaagtcgattagactctcagtttttttatttattttgctgtatgttttctaacggctggtaaaatttcagtagcaattaattcaatatttttctcaattttatcaaatggtacaccgccaaaatcaatttgtgccataaagcgttgttggccaaataattcatattggtacagcattttctcaatgatttgttgtgggctaccaaccattaaagcatcacggtaatctattgcatttgtaaattgctgtttcggatacccaccaccgcgcagtgtaagcataccagcattaatgtgagggtaatattcactaagtgcatcttgtgaattttttgccgtataaaataaactcgttgtcgcaactggtaaactagctgaatcaaatccactttgtacagccgcctcgcggtaagcatctactgacactttaaagttaattgctggaccaccaagtgttgttatcatcattggtacacccgcgcgtcctgctttaattgcactagctggtggacctccaaccgcacgccaaattggtaagttattatttttcgctctcggaataaccgatgcatgtgcgagcggtgctctgaactgtccattccatgtgacatgttcctcgttattaatttttaataaaagatccatcttctcttcgaataattcttcataatcattcacgttataaccaagtaaactatatcccccaatacgagatccacgaccagccacaatttctgcacgtccattagaaatcaagtcaattgtagcgaaatcctcatatactcgaactgggtcagatgtacttaatatcgttgctgaacttgcaatttttatatttttcgtagcttgtgcaatagctcctaaaataactgtatgagcttgtgttgtaaaatgcgtttgatgactttcaccgacagcaaacacatcaagccctgcctcatctgctaacttagctgtttcaattagttcgtgaattcttttctctggcgtaattttctccccattatgtggatttaaaacatgatcaccaattgaatataatccaaactcaattccttttcttatatctatacggtatttttccatagttactctcccctttaataaagtagtattagtttttttctaaaaacgttggtaagtcaggtatatctccgtattacctacgccttcacttgattagtcaattgatagtgtaaaaaaaattactcttgcggtaattcttttttttcactatgcttatgaactttcgtcattagctcgtataatattttctgctcttcttcatttaatacatcatcaaaaaacgaagattgaaatgcaagttgctctggcaatgctttctctaaggccgattccccttgctctgtaagactaattgttttcgttttccaatcttgttttcgtacaatatatccttctttctcaagacgagttaacattcgagaaataccaccttgtgtaacagttaccttttcagctaactccatttgtgttagtggctgatacgtacgtatttgcaaaagcacatcaaattgagctgtcgttaaatcaaaacgttttaaaaactcatttgacatttgattactttggttcgtaaatcgtattaaacgtaaccatattaatgatcctatcgtattatcacgcatgttttgtcacttcctagcgttcatcttactatcactttactacgcaagtgataaaaaagcaagaaaaaatgtaataaatatatcgatagagtattgcataaataatgataagtaagaattcatataaacatgaattcttacttatcattattcttaactttgcctttcattcattactatatttaaagctgccatagcttttggccaaccaacgtaaaaagccatatgtgttattaatgcaaccaattcattctccataaccccattttgtttagctagcttcagatgaaattgtaattgttctgtattaccgagactgattagtgctgacacagtacacaagcttctttctcttaatgttaaagtggcatcccgccacacttcctcaaataatatcttttcactataatgagcaaatgcaggtgacatttctctcattttctttttaatatgtacttcaataagttcatttttttctccctttattttcaccatttgtgctattccttgaccaaatgaccagttttcagcagctgtctcatttaatgtaataaaaatatccgaagttttaacatcggaatattccgtaatttttaaggataccgattgatacaaatcttttttctgttgcactgttcttcccggtccacatgtaatagaaacataaatcatattctctgttctcttttctcctctttccaacaaataatatggattatataaaaatttgttttcttggtaaggtaagaacatttgaaaataatcattttcagggatgttaaaatgttcaattaatgaaagatggatacattcacccattttttccaactcttcttcatttaatatgttttcaggataataaatcttcacaaaaggcatagactttcattccttttcttatttttaatatgcaacaaaatttcatcgtgaaatgtgtaaaatctcatatactgtaacacctttattcactgcaatttcaggcttctcctcataaaaattaaacctactatacccccatttatccggattataaacgattacattccctaaacacttttcgttgttttgtacatcttcattcatagtgcttaattgagtcccaatcagtgttttactttgagaaatacttcctgcatattcaacaacatatctacttttcttaaatccatcacttagattaaccactaatggaacacctatatgtatttgttgccatccaaaagattgtaaaatgttatcgtaatacccttcaaagataaatttattcatcccttcatgaccattccaaatatataaaggtgcatagcagttataaaaattcccgtctttctccgtttccgtaattaaataagctttaaaatttagtgcttggaaaccatcagttttataaccattatcctttacccttttcctaataatttccatgtcataatcctttggcaaaatgaccttatattgcattccaatcatgtttatcactcgctttcaatcttatatacattatgataaatcgataagtagctaacgtaaaataggtataaattatgtttggtatcatttataatgatagtgcataaggggctgagatatatggaaataaatgatcttattatattcaaaactgtagccagtgagggttctattagtaaagctgctaaagagttaggttatgttcaaccgaacgtaactgagcgaatcaaaaaattagaacaagaattagaaacgcctttactacatagagataacaaaggcgtttccttattaccttctggtgacattttattagattacacgaataaaatattaactctattagaagaagtaaaagatgaaattaaaacgagtggttcttcttatataatagcgacgtcacaatctattttgacaaattatttaagtaagcgtattgaagaaaacttcagaaattatcaaatatatgtagaaagtagtagtcatttgcaaaaattacttcagcaacaaaaagttgatatggtcataacttatgaggattatcctgacgcatcgtttaaaaaagtgttcacaacctcaatttctgtaggcttattaaaagcgaaagaaaaatgtaccattgattattcaaaagaaattttcttcgttagcaatgacaaaaagtgcccttttaggaataagacgatacaatttctaaaagaaaataatttatctcagcgtcaacttcaacaattagattcttattcgcttatggaagagtttattcaggacggaaaagggatagcctttttgccgattaaaaatgataaattggtaccaattgaagatgttccagttgagaaattagctgttcatttttttgcaaatcaaaactctttcaaacaaatccctgatgaactatttggttaataaaaaaatccctcctttatgaatctaaaagagggattttcatattctatacaattgatttttcacacattttgctccacttctgcacttttctccttcttattccgtttcatattcttcagtcccttaaccgtcccaaccaatcctttcggaaaaacgagtagcacgataatatacaataaacctagaataatcgtccatctttcaaaaatcggatattccgtcgctagttctgataaataatattttagggattcaataatcccagatccagcaatagctccaattaatgttccgactcctccaatcattgtcatcaagagtgcatttagtgtcatttcaattgaaaatacagtcgtattgacaaagcgtaatgtaataacaaataaaccaccgctaattgcagctactattcctgccactacacttgcgattattttataatggaggactttatatccaagtgcttcaacacgttgttcattttgtgaaattgcctttaatactttcccaatagaagactttgtaaaaagacgtaatagaataaaaatgaagcataaacatacaagtgatacataataaaaagtaaaacgatcacggaatatttctggtaccccaaatgtaaaaccatctcctccgtgagtgagcccacgccatttttcagcaaggacgaaaaacaactgtgaaatagcaagtgttaacattgcataaaaatgacttttcaatcgtaaagaaagcaaaccaattatataactaacgattgctgaaacgataattgcagctactattccaattaaaaagttcgttattgatacgccttgtcgatcaaataaaagcgctaccccatatgctcctatcccaaagaacatacaatgaccgaacgatacaattcctgtatacccaagcaatacatcaaaactcattgcaaaaatagcaaagatgaagatttgagtgaacaaaattaacaggctccgtgaatcatttacgaacggaaatacacttaaacaaatgagcatacatactccgaagtatactttaattcggtccgatgtgttgttcaccatttcaccccttttcaccaacaagtccagttggcttcactattaagaaaaatagtaacattaacatattaattgcaagtgataaatctggtataaaatacgctgtaaaagcaccagctaatccgacaattaaagaagcaatagctgaaccttgtacgcttcctaatccaccgataattactactataaaagctaaaattgcatactgcatgcccatctcggcgaaaataacgcctgaatacggtgctaataagaatcctcccaaagctgccatccctgctcctaataaaaagacgaaagaaaatatcgcttttacattaataccaagcgcttgaaccatttctttatccattacacctgcacggatcataagacctatcttcgtctttttgagtaatagtagtagtgcgatgtaaataattatcccaatcaaaataacaaatagacgatatttaattaatataatacctccgaatgtaaaacttccttgtaaccataacggtaattttgcactaatagggtttggcccccaaaatattttaatacactcactaagaacgagcattcctccaagcgtaacgagcagctgtcgaacatgatttccatataccggtctaataagaaacctttctaaaataaatcctaggaacattcccatggctactgctccaactaaagctaatatataacttcctgtcatattaaataaccaaacacctgtaaatgctccccatgcaaataaaccaccgtgtgcaaagtttaaaacgctcattagaccgaaaataagtgaaagacctgatgctaacaaaaaaatgagcatccctgttgaaatcccatttacaaataaattgattaacacatccatccttttcacctcggattcatgttaagagattcctaaatatttatgacacatttccttatccttttttaattcattcataaaaccgttatgaacaattcgtccgttatccataatgtaaaaataatcaccaatttgactagccatcataaaattttgctcaacaagtaaaactgttgttttctctttcatcttcaaaatagctaccattaatttctccaccattatcggggatagccctttgctcggctcatcaataagtaataatccatcactattaataaacgctcttgaaatagccaacatttgcttttgccctccgctcaagagcccacttttcttattccaaaactgctttaaatccggaaatagttccagcatccactctattttcccttctacttccacaccttttcccctagcaagagcgaatgtttcttctactgtcaaatcatgaaaaataccttgattttctggtacataccctattcctttccttgaaattaaatgtgtaggtaatccacttacttttgcactatcataataaatttcaccatctgcaatgcggtgaaaccccataactgaacgtaatgtcgttgttttccctgccccgtttctaccaaacagtacagtaattgtccctttctcaacagcaagagatactccttgcaaaatatgaaactgatctaaatacgtttctatattattcacttgtaatagtgccactatataatccccctaaataagcactttgtacacgctcatctttcataatttcttctggcaatccttcagccaataactctccatgaaataaaacgataagatgatctgacaaacctagtatcatatccattttgtgttcgataagtacaattgtgctctctggatgtttcttaatattttcaatcacttgtaatatagcagggacctcctcaaccgaaatacctgccgtcggctcatcaagtaataacacatccgtttttaaagccaataacatcgcaagttctagctttcttttctctccatgtgccaaatctttcgctaatacgttctctttctcgtgaagtaatactgtttttaagaaacgtctcgcctctccaacttgttgctttaattttgctgaactcgggaaaaaactatagtaatcttgtacgaatgattgaacacttaaacggacattttcaagtaccgttaattctgggaatatgtttgtaagctgaaaagagcgaccgattcctaagcgtgttcgatctgaaatcgatagttttgtaatatcttgccctttaaaatacacttcacctgttgtaggtgaaatctgtccacttagtaaattaaataatgttgtcttccccgcaccatttggcccgataatagaaatgagctttcctttttggacagttaaatttacatctttaataacttgatgttcaccaaaagatacactaagatttttcgtctctagcaaatgtgtcacgaaatccctccctttaaagccgtgagtatgaaggaaatatgtataaagagggtcccccctctttatacaaaaacaacagaaaattcagtctatttattttgaactggtggttctgtttctttcatcgttaattctcgctctaacactggcaccggataatcaacaccatcttgctttttcaatgtgatagaatacagcgtctgcatcgcttggtggtccttctctctaaacttcatctttcctttcggtgtatcaaattccattccttccattttcttaatcaaggtatctacatctgtatcaccttttgttttctttaaggcttctacaatagaaattgctgctgacattcctcccgctgtaaacaaatctggcactacaccattaaaacgttttttatgctcttcaactagccaatcattcactttattttttggaagtgtgtgataatatacagaaaaaccttgcatacctactaatgcatccattgtttttaatgctggtatatctggcgcacctgtagaaattttaataccttgcgcttccacattcatatctttcaactgtttccaaggtgaatttgcccctgcccaaacaataaataaataatctggttttgaactaatgatattttgaatattcgctgtaaaatctgttgaatttgtatccgcgtattgctcattcacaatgctcgcacctaattttttcgcacccgctttaaatgcagcaatcccttcacgaccaaaagcgttatctggggcaaatgtcgcaatctttacaccttttttcgcaattgccgctgctcctgcaatcgcatcttgtgaggaacttcttccagttctaaaaatatatttattccagttcttcccggtaatactatccgcaactgccggttctacaaccataatcttttcatattccccggccagtggtaaaaccgctaacgtatcacttgaactagacgatccaactaaaaaatcaactttctcttcttctaataacttcgtagcttttttaactgctacatcagctttcgtttctgtatcttctacaacaaacttaatctttttcccatctactttcccagttccaccagttgcatagtctaaccctaattcaaatccgttcactgtttgttttccatacgattctagcggtcctgttaaagaagcaagaactcctaccttaatcgttttttcatcctctgtacttgttttctttcctgaacaagctgccgttattaataacgaacctaaaacacaaccagtaaacattgtctttagccacttacgttttttcatcgacattgtgatcctccccatactttactttctgatagaatcaaacacgccaaaatcccctgtccgtaatcatgactaactaattcgatagataatggaaaactcttgtagtaccctctacattcggcacaaatatataatcaccttcctatgtaatggaaacggacatacaatcaatatatattctgtaatccaattgaaaatactgtttcatttcagtaatgatcatacaaaaagactaacttattttttaagttagtcttttcaccttaattagagttaagttctactttctctaacccttcagccaattgtttcttatctagtccttctcctattactactaagtttgtcgggaaaccgaagtcttgttctaataaagttggtactccgaacgaatattggaataggtgagggtatttatctccacggaatttcacaaaacctttcactcgataaatactatctggtaaattcgaaagccattcatataatttgtcttgatcaatcggtttcgtaaattgatatgtcatcgtttgtatatgtaaatgctgtttgacatgtagtgtctcatgttcctcatcatttggaaattctgcttcctctatatcttttaaagatatattgcaatactttgtctcatacattttcgcatgatcatttattgcctttacttcttcaaatactgtgttcttatcttcatctgttagtaaatctgctttattaacaagaatgtgactaccaaatttaagttgctcatgcaatagctgttgtacatttgcacttaatatacttcggtttaaccaccttactgcatctaaaacgactacaattgatttcacttccagaaaaggagctaaaattggcgagacacacgcgtctaacacttcaattggatgcgcaacacctgtcgtttctatataaattacatctggtctttcttgttggtataacgaatgtaattgtatttcaagctcttcttttaatgtacaacaaatacatcctttaagaagttctcttaaaacattctcttttccaataatatctgtatctaccgagtattcaccaatttcattcattaatactgcaacttttctattcttctttttctctgctaacaataaattttgtaataatgttgattttccactacctaaaaaaccacctaatatatgaatctccactttattcattcaaccgaccatccatttctttacttcaaatgtattcaaagcgtaataattacgatttatatttatcattttattaaaagaatgaacatttgtaaatataagagattcactgttcatttacttcatatgcaactctaactccagactcaattgccccttgcatccatccatgtgttaatgtcgtatgctctcctgcaaaatgtacttttccagatggtggtgtaatatacggaaataactcgagctcttggcctggttcgaaagctgtaaatgcaccgcaagaatacggatttttactccagctaaaagatgttccagtgacaaactcactatagacgatgtcaccgtatatttccgctaaattttttaatgcgtaacgaatacgatctctttgcgggagactatcccatgttaacgcctcatctgcccacgtataacttgctataacgatagctggtcctggagtatgaatgccataactcggatagtatgtaaaccgtatcggtaaatcagtaatagatttacctccacactgtcccgctttctcccaaaatctacttttaaactctattgcaattttagttgcagcaatataatttaattcacgaattgctctttttttaaaataagagaataaatagtatggctgaacttctacaaatcttaacgctgaaaatggaattgtaataatagcaaaatcacttgttattgtaaattgctctaacgtttgttcatgatttccttgtaacattactttattatcttcttgtataattttatcaaccttatactgcattaaaatatgttcccttaattgtggtaagaatgcattcgataacttatccattccaccagttatttcataatatttcgttgttgaagtaaagaaaatcatttcacgtaatacttcaattaaggacattcccatataagcttccatatcaagaagtaccccaatcatatctattgcaccatctgaataatactccattaaaaatgaaccaagcgaatacgttttatactttttttcaacgataagccagtttttatcaggatccttcttaatataatttagtattggttctaatacctcaatcattagctcttctgccgtttttcctctttctttatccaaaaccggatattcaagtacacttggatcattttcaaacacattcaatctcgtttgaatgttattcgtataaatgatatctgcaaaagttttatttataaaaaggtttaaaggtagtttaaatttatgaatatacgctaaggttaacttatgggtgtcagggattctcatcggtcccgcattaaaatataaacccacactaaatggttcccgaatcgtatacactctgccacctattctgttatttgcttctataatcgttacttcgtgcccagcctcttttaataaagaacctgcaactaatccagaaatccctgcacctgcaatcgtaatccgttttgggttattctttttaacaagccctgcatgaataatatgaagcatttcttccattgttaatgggttccccataccatttccccttttacaaaggattttactgaattatattcggttcactgaattcctatgttttgttcgcagatttgcacggatacattttcaaatacttgaatatcttttataaaatgtaataaactagatatgactctatagaagtaagacgtattatcttacataacaaaaccaatgaaattgcgaggaattttgaaatgaaaaaaggtattaaccgtgttgtattagtaggaacaggagcagttggatgtagttatgcttactgcatgattaaccaagccgtagctgaagaatttgttttagtcgatgtaaatgaagcaaaagctgaaggggaagcaatggatttaagtcatgctgttccattcgccccagctccaactagagtatggaaaggcagctacgaagattgtaaagatgctgaccttgtagttattacagctggattaccacaaaagccaggcgaaacacgtttagatttagttgagaaaaacgccaaaatctttaaacaaatcgttcgcagtattatggatagcggatttgatggcatcttcttaatcgcaacaaaccctgtagatattttaacttatgtaacttggaaagaatctggtttaccgaaagaacgtgtaatcggttctggtacaacgcttgattctgctcgtttccgctatatgttaggtgagtacttcgatattggtccacacaacattcacgcttatattatcggagaacacggcgatactgaacttccagtttggagccatgtttccgttggtatccaaaaactacaaacactgcttgaaaaagacaacacgtataatcaagaagatttagacaaaattttcataaacgtccgtgatgcagcttaccatattattgagcgtaaaggcgcaacttattatggtatcggtatgtcacttctacgtgttacaaaagcaattttaaacgacgaaaatagtgtattaactgtatcagcttacttagaaggtcaatacggtcaaaaagatgtttatatcggggtacctgctgttttaaatcgcggcggtgttcgtgaaattttagaggttgaattaagtgaagatgaagaattaaaattcgaccactctgttcaagtattgaaagaaacaatggctccggttctttaattaagataaaaagcaatccaatttattttggattgctttttattttcattatctcctatgactttttagtgattttctatcatttcttattttttagtcgcatcctcattatttatatcaagtacatctaataaaaagataaagattggtatcccgataataagcccccatattccgaggaaatgctctgagaagataagaatcataaatgtgtagaatattggtaaatttgtttttgcagacataaacttcggatttaaaaaataactttcaagagcatggattactgttatgaatacgagtatgtatactacgtacataactccgcctacgttgtaagcaatgatacaaagtggaaacaaagaaataatcacacctgcaacaggaatcaaccctagtaagaaaatcataacagctaatacaagtagctgtggaaatcctaaaacgattaatgcaatgacagtaagaatacaatttacaacggcaattaaaaactgagcctcaattacttttccgaacgatcttgcaaatctttcaccaaaatatgcaatttcctcataaaagatttttaacttactatctttaaacttagatgtaaatgtaataatacgctctttttctaataagaaaaataagcttaaaattagagataataatatttgtaaacttaccttccctatatttgctattgattgatagatgacatctacaccttgttctatatattttgatacttccatcccattaattgtcgaaagtgcatatttaacgatttcattatcaggtggattttgaaaaaatagtttaaactgataaattaattgtgaaatttgtatcgtcagcacaggtaaatatttatataacgttgtgcctataaaggaaaccaatattatatataaacatgcaataacaattttccggtttactttcaattttcttgaaataaaacgttgaaatcgatccattaaaaacgtcagtataaacgtaattaatattaaattaatcatactttttaatgcgtataatacaagcgctactattattaaaacgagaaaccgttgaaaccctctacttcgaaaaaaactctttacttcattcattaagaattaacctcccccttcaatggatggaaattgaatatattacattttatgaactcctatagacaatctttcttactaattgggaagaatccttttttcttttttattgtcggattttttcatctaatacttttctaaaaactactttatcaattctatctttatctttcgttttttctgtcatagtatctttttcgtcataacctaccattacgattacaggaatactatataagttcgatttcttatttaacgctctctctttgtctaactttcgcgccacttccatcgcattaggattaatctctgtaacagcatttaatgctattccattttttcatgttgttctctccaatctacaagttgctcactagtaaattttcagattgaaaaaagagagttatcttcttaactctctctagacaaaatgctaaatgatacaattaattattccaatcaaatcattgctttttttccattcgcttcgctaacaattccttcacttggttataggttaaccctgaatttttatttaaacgctttacttcctcaacatcagtacctaccactgtatattttttctcatcattcatttttctaattcccttctcaccgtattatttcttatatttcttccctaaatacgcataaattaacaccactacaaaaaaggaagctgtttttaagcacagcttccttctcgttacatattgtatttcttaataaaatttcactacatcttcagtaggtaagaacgttctttctgctggttgttcgtttggttcaccaaatggcatttgacctactaagctccactctgccggaatgttccaagtttctttcacttcagcatctacgattgggttgtaatgttgtaatgacgctccaattccttcagaagataatagcatccacacagtatgttgtaacatcgcatttccttgatgagaccagaatgggaactgatctttatataatggggcattttcttgcattttttctacagttgcttgatcttcaaagaatagaactgttcctacacctgcatggaagccttttagtctttctacagtcgcttcaaagttttctgctggtacgcgggctcttagtgtttctttaacgatatcccaaaacttttcatgctctccatccattaatacaaccatacgaccactttgcatattgaaagatgttggtgcgtgtaaagctgtttttaacacttcttcaattctttctttcgtaattgcatcgttttttgctactttacgaattgaacggcggttcacgattgcttcttttaagtttgttgtagttgctgacattttaattcctccaaatgtttgttttataatttattttgttatttcataacaagcgaattagcaatatccatcggtattacattgcataccttcaaatgaatttgttttatccttttcaatttctttatcaatgaccctttctagtgtttctttactagcaagcccttgaatgacttcatctccaatcatgacagttggaacagccataatattcgcttcatcatatgcgtgttgaattgcttcttgatgcttttctttatatttacgagttactaaagcatctttaaattccgcctcaggaagtcctacttctaccgctaattttgttaacacatcaatatcttcaatgttttgctcttcttggaaaaatgctgtgaatacgcggtgatgatactcattacctagtccacgttctttcgcaaattgacatccttcgaaagctaaatgtgtatatggatgcggtgaaacacgtggcaagcgcatatcaattcctaacttcttcgctgtcggaagaatgaaagcatcccatgaacctaatttttctggttcattccatggatctatttttgaatatggacttggacgtaattcaaatggcatccattcaatctctacatctttctctttcgctacctcatctaatggaccttttgctaaaaaacaaaacggacatataaaatctgagtatactttcatttttacagtcataacttttacaccttacctttattgttgtaatcaaatcggttacattaatgacaaaaaaatataaatatgatttaagcattcattttttcttgcaaagtttcaaacaactgccccattgtaatatttctcaaaacttcttccatcgcggattgtgcttgaattaaaataatttctaacaccgcttgaatattcgcaccaattggacaatctggattcggtttctcgtgaatatgaaatagcttgtcttcttcgactacgttcactgcatgatacacatctaacaatgtgatttcatataaatcctttagtaatcccgcgccaccgggtccacgatttacgtaaacaaagccagcttgtttcaagtacgacatgattttacgaatgactactggatttgtattaacactctcagccatatagtctgaagtacaaagtgaagatggattgtttttcaaaatagataaaatatgaacagctatggaaaagcggctactaattttcatcgtaatcaccacctcgatgtaatcattatagttacaactaaaaaataagtcaatccttttcatagattttttataagtaaattaaaaagtgtcccattatgatatatgagacacctctttttattctgcaaatagcgattgaaattcttcaataaatagctgcacagcgattgaagaatcctttaatgaaggaacagctaaagcaatttctctccatacttgtggttccaattctctcgtttgcacattttttggtaaattcgttaaagataattcagctaatattgcaatgcccaatccttcttgaatcatatttaaagctgtagtaactgtcgaaattacatattcagcccgaagtggtacgtttgcttgtttaaacatatcaataatgggtggttcgtatccacccttacataatatgatcggttcattctctaaatcacaaattgtaagagcgtccttcttacagagaggatgatcctctcttaagatagcaaccattttccccttcgttaatggaacaatctccatatctttattaggcaaaataacaatccctatatcaataaccctcgatactaaccaatcttcaacttctttaatcgtcccttcacaaagaactacttctaagttcggatacttttccttaaaaaggtttatcattttgggtaagaaatgtgcagaagcgctcggaaaactcccaattcgaatcgtcccaacttcgtgtcctttctccatcgcaacttcttgttcaatcttcgctacaccgttcaaaatctctctaatatgtacaagaatcctatttcctacatccgtaacgagtagcccttttcgtttatcacgtataagaatcgtaactcctaactctgactcaatacttgaaatcgcatgactaacagctggctgcgtcatatttaacaccctggcagccttcgtaaaactacctaaatcaacagtttttattaatacttgcagttgtgtaatggtcataactaatcacttatactcctcataaaaaagattcattttatttattacagtcgatatcatatcatagtgaaatgaataacaacaaggaggtctttcagtgacacagctttctcgaactaagacggccatcatccttacctttctcgttttcatgtggggaatcaattggcctttatcaaagtttgccctgcattatacaccacctgttttatttgcaggcgttcgaactttaattggaggattcattttacttctgttcgcattaccgaaatacaaagagttacatttaaaaaaaacgtggcatttatacgttatttcttccttacttaacatcattatattttacggattacaaactgtcggccttcaatatatgcctgctgggttattttccgccattgtatttctacaaccagttttactcggtattttctcgtggatatggcttgaagaatcaatgtacggcttgaaaattttcgggcttgttctcggatttattggtgtaggcgttattagctcaagcagtttaacaggacatatttctgttattggaatccttctcgcgttaggatgcgctattggctgggcacttggcacagtattcattaagaagactggtcaccgtgttaatgccatttggatggtaacacttcagcttattattggtggtctttgcttaattggatttggttcagagtttgaaagctggtctagtatcgcttggagtatgccatttgttagcgtacttctctttatttcattctttgttattgcaatggggtggcttgcatacttcacacttgttggagctggtgaagcaagtaaagttggggcttatacattcctcattccactaatagctattattgtaagttcaattttcttacatgaggctattaccattagcttattcatcggactattatttattgttgtgagtatttgttttgtaaatataaaaccgaaaacacttgctgtaaggcagcaagttgaattgaaataaacgtaagaaagagcctactgttgtaggctctttcttacgtcttactttttacgacgtactacaaaaacacacgcacttaccgacgatactatggcaaaaatagataagacaattgctatcaattgcatattactagtaccttcatttttttctacactagacacttcaccatgttctcctgttaatgacgtaccttttgcaattgtagtaagtgaatgcggtttttcagctttttcatcacctgtccattcaacaatttctccatctttatattgttgatatgcgtcccaagctattttttgctctttatccggatttttagcgacgaaagtaaatcgctggaactgacctgttaaaattccttctcctgtcgcttcccatactacagttttaacttttccggcattatctttttgctcctcaactttccatcctggcactggttcatactgctggaactctactccagacggtattttcagtgtaacttttgtcgttgctacatttttttcaactggtacttttatcgtataagtctcccaagaaccaacgtcagaagttgctggttttacagtgacgtgcgcactaacaggtaacgaaaacattcccattgcaataattgttgcgatcattgttgttcctaatttttttatacgtttcattttctatttactccttttcatctataacatctgtttatcctgctactcgctagcagcatgattggtaaaattttatctgccacctacaataaatttaaaatctgtatcgaaactatcaagagattttgttaatccatgaacatgtatattccagtttcctgtcatattaatatacataccttctgcttcatattctcctggtgaaactactgaaactttaaatgaaccttttcccatgttcatatctaatgattgagtcgtcaatatcatttgttccatatcagtaacaggctgtcccttttcgtcctttagtgtaatatggaatttattttgtcctaccttattcggacttacatttagcgtaagttcatatccattatctaattgcttactctctgtaaatggtccagtaggaggcatcggtggtgtttgtacgtttgtcataaaagctacgattacgaaaatgataattccaatgacaaactctactttcaccgtagctcctaatccttgctgcgctcttattctccctttcacataatgaataattcccaatatccccatgaaaataaataatagtatctttgctaataaagccaatccatacttcgtatcaaataacgagtggattgttggaataaaaaatgtactattaaaaaggcctgttattaaaatcacaatgacagcacctgttgcccacggtgaaaaacgcttaatcatatcccaatacatatgccacttattatcctctttacataaaagaagaataatagatgataaaccaccaacccataatgaagctgctaataaatgtagaaaatccataacgacagcaatgtctttaaactttaaaccgtatgcgtgactattaaaggccttcataacaagtagccctataaacaatagtattggaatactccatactttaaacgacgaaaacttctcatgcttcaccgcaaaatacgtaacaattataagcgtactaatgagaaccatttgagtaatccatacataaccaaaaacagaaagctgtaatgtttcttttaatagtaaaggattgaatgcttctagccatgaaacatcagcatttattttcgcttgcagtggtagattgaataacaagctaatcaatatcccaaataaagagatccatattatgttcttactccttgatcgaaccgaggttgcattgcctttatacataataagattaaagaatagcactcctataaatagtgagaaacttgtatataaaattccacgttccataatcatatcgatttgtgggacgtagcccatctcttccacttgtatatcgtctgtttccgcttccgctaatccaacccggaacgggataactccttgaattggatgtccatcagctgaaatcactttccactgaatagagtaaagaccatttttgagattgtcttttaatccagcttctaatagctttttattttttttatcaatatgagcatcttttaaatcgatccttttacctgatgtatctctcacgtacaatgtattaaaacttgaaacttgtatgtcctcatcgaattcgatttttacaacagatggtgctttcttcaatgtttcattttcagtagggtttgatttcacaacgtacgcatgagcagatgcactttgcggtatcaatatgataagcacacacacaagtaatagccatgtccctaatcttctcattactttcacactcatttcacttctttcttcctcattgctctattttcattactttaacttccgaagtttaattctcgggcgaaatattaacctgattaaatataaacttctataaagtataactcttatttctcttccacctctaaacttctaatataatagtaactatcactatagatacaacttacatttttaaagccgattgttattatatcataaaatatatttatgtaagttatcaaagaagaaaagttatcgtgaatcatttgtgaaaaaaatgtgaaatacataaataaaaaggtattacgttattacgtaacacctttaaaaaaatatccctcttctatttctcttccggataatcacaatactcgataatcgttccttctgtatccgctgggttaagataaattaaccttctaccgtgcttattaatgcgtagtgtatgctctaatgtccgaataccttgttcttttaactcttctagagccacatctaaatcatcgacacgatacgcaacgtgatgaacacctttacctttttgtttaataaaacgggcaattggagatgttgtattatttgtcggtgcaagtaattcaattctatctccagccacttcaagaatggctacttcactttccacaccaggagcttcacttacgtaacgatctattaaagttcctagtaacacattttcataaaaacgtatcgtactatctatatctcgaactgcgattccgatatgatcaattgtttttttcattttatttcccctactactttattttttctcattattaatagtaacaaaaaaagctatagaaacaagtctataactttttttatttaacctattttcttatccgctctagttgctggttgaacttggtttttcacttttaaaatgctaataccatatccgataaatccaccgataatcgctgggaagatccagcctaatcctacttcctgcatcggaaggaatttagtgaacacttggcttactacttcaatgttaactccagctgcacttaatccatcaaataagctgatgataaatgttacgattaagcttacttgataaacttcagctcttcctttaaataatgaatggaagaatgttaagaaaatcaatacgattgctagtggataaattgctgttaatactggaacagaaactgcgatcaattgtgttaatcctacgtttgcaacaattgcactaaatacacatagcgtaattgcaattgctttgtaaggaacatttgggaataacttatggaagaatgaagaacatgctgatacaagtcccacactagttgttaaacaagctactgtaatcattaatcctaataatactccgccatatgatccgaaatagtagttagaaactttcgctaatacttctccgccgttctctaaatgtccaagctttgcaacacttgaagcacccatataagaaagtgctgtatagataattgctaaaatagatgctgcaataattgtcgcttttgcacaaacgaccataatttgtgttttcgttttcgcacctttttctttaatagcattgataatgataatcccgaatacaaatgatgctagcgtatccatcgttaagtatccttcttggaatcctttaaagaatgcatgtgatgtataagcttccactggtgcttgcatatctccaatcggatgtataaaagcaacgattactaaaataccgatgaaagtcaacttaattggcgttaagatttttccaacaatatcgacaattttcgcgggatttagcgaaaaaaaacaagtgatactaaagaatataattgtgaaaagaattaaaggtgtagaacctactccttctggcataaacggcttaagaccaatttcataagaaacatttcctgttcttggtattgcaaataacggaccaatcgctaagtataaaactgttgtaaacacaatcccaaacactgggtgagcacgactagctaatgactgcaaatcatctttacctgaaaaaccaaatgctagtacacctagtaatggtaatccaacaccagttactaaaaatccagcgttagcaatccatacattctctccagctgattgaccaagcatcgctggaaaaattaaatttcccgctccaaaaaatagtgcaaataacattaatccaataactactatgaacgaaaacggtactttattcgccataatataacccccattcaagtttccttatctcattttccaattttaactaattgaattttctgaatatttaatttaagtatcaactattcttgaattcattatagtttgctatataatattttgcaatactattttcgaacttttcttttattttataaatatacattttttaacatgaaaaatagactaaaaaaccaacatggtcatccatgttggtttttccatttactatcatgaattaaaattttgctgctacttttttaacgttttctagaccttcttcaacaatttgttgtgaacgatctggatattgattgtgtccttcaattacaactgtctctggatttgtaattccccagaatccaagtacagttgttacgtaattaactgccatttccataggagccatttgttctgaagagtaatctgaaccacgagcacctaacacaactactttcttaccaccaactaaaccttctgggccatttgctgtatatttaaacgtttttccagcttgagataagtatgaaatatatgtgattaatggtgctggtactgtaaagttccataatgggaatgcaaatacaaccttatcagcttctaaaaactgatttaaatattgatctactgtagcaactgccttctcctcttcagctgttaactccataccttggctacgtttatatccacctgaaatcgcgatatttccgtaataaggaagatctaatgcaaataaatctaattccgtaatttctgtatttggatttgcttctttataagtacttacaaatgtttcatacatttttgaactaactgcttgctccgctggacgatcgtttgcttttacaaataatacttttgacatttttttattcccctctacattcttattttcttcttttttaccaaataatgagctaaatagtcccattttcttcacctaatctttcttttcatattcattattcatcatcataaaaattcttattctaagaaaaagttccaatagataccttaagttacgccgttgcaactttttgttatttaattaccttatgtaagtgattgtaatatagtcacttactttagtcaagtaacttttaataaaaaataaaatctcgacttaaaaatattaagcgagatacaattgaacaccaaatacatctttattacttgtataataaacttagagaggaaaattcatatatagaaaggatttattcatgagcactatagaaaagattcaaacttttattattctttttgctgttacatgcggcatcgtactcggacaatttaatatgatacatacgtattcagacaaatttattgtccccttcttatttttcatgctatatggattattcctcagcatcccattaaaagaaataaaaaaaggatttcgcaatttaaaatttgctggaacaagtcttactattaacttcttatggacacctttactcgcttgggggttaggggcactatttctttccgatcatccagcactttgggttggatttataatgttaatggttactccatgtacagattggtacttaatctttactgaaatagcgaaaggtaatgtagcactttctactgcaattttacctgtaaatttaattttgcaagtactgctccttcccatttatttatttttatttgctggtgtcatgaaaactgtagcggtttctgttttagtagaaagtattgttatcgtaatcgtcttaccatttatacttgcacacgctacaaaattcattatgaataaaatgaaaaaagctgaacctctcgagaataaactcattccgttttttagctctgctcaaattgtatttttaagtttagcaatagtagcgatgtttgcatcacaaggtaaatatttactacaaaatatgaatgttgttttattattactcgttcctgttctattgttcttcatcatcaattttttactaggacaatttatcgggcgcatgatgcatttatcttacaaagatacagtaagtctaagcttaacaacgttagcaagaaactcacctgttgcactcgctatcgctgtaaccgcttttccagacgaacctcttatcgcacttgcactcgttattggaccattgattgagttaccggtactagcttgtgtgtcacaagttttgttgcttattaagaaaaaacggcaatacgcataataaaaaacgtcccattttgggacgttttttattatggaaaaattacatacaacacttatttcttatttatcattacaaatgaaattaccgaaactacaaacataataatacccattataaatcgatgggctctaaaaatgttatagagaattaacttttcgttacattaacagatcctttctaattaaaaatgataggaaacgtaaatataacgaaagctgcccaaagtccgtatattggcaaatacttcgtaatggcatcttgaatagctgtcggtcctgatttgttttgcaagaaacgcatataggaaaacataatccaaattagatttgcccagatcagtatatttacacctaaaacagctagtctattaggtgtagtcccgtaagatgaaagtctaaatacgatggctgacaatgcgacagtgtcaataataagcgccagaacaattaaggaaacatttatataatctgaaatgttctttttctcgtccgagtcactctcaacgatagaaaatatagtaacagccaatacaccaagcagtattccgttgaatgccattaggaaattacgatccaagaacgggtttttcccgaccaaaattatcgttataagataaataaacaatgtgaccaggacaagcggactaaagattttagatatgtatggtgtaatatttttagcaagcttaagattcattgatactaagtatgcagccacaatagcgagagccgctgctccaaataaaacaacattactaaaatagaattctcctatatctaagtcaacaaagctaaataaacgcatggtgaatattgctagtatcattccgctcactgccatgctcccgtagagaagacaatattctaaattaaatttaatataggctaatcttgtactgccttttgaatattcatttcctgtaaatgcaagccctactaagacccataaaaatataggaagatgtaaataagcaagtatggtactgtctttataatttattggcaatgtattaagatacaccccggaaactaggaataacgctataagggaataaataatactttttttcggcttattattgtaaacaaaataagcagcaataaagggaattacaccaaaagccaagtttattggagcaattgcttcctgctcaacaaagtggaaaataatcctggtgcttatgccggccaaaatagctaaaaggcccatgaataagaaacctttttgaaacaaagatgttttttctttatttactttctccttgaaatgcaacctttcataccaagcacctagaatttgagaatcagggttttggtcccatgcttgtgagaatgcttttttaaaagctttcggatcttttctatacatcttctccaactcatgggggttatccatatgtttaacaatcaaattgttaatattcatagttatacctcctctaattttaaaaataaggttgttaccttttaacaaaagcacctcactcatttattatgattttgattttaatacaaaatttatcgttttacaataaaaaattattatttaaagcatttttttatcgttaaatttcatttcaaagaaaaacaaaagagcatgacaattttatgtcatgctcttttaacaaattaattctcaaatacaaaattaatcttattatctttccactctaatttcgcatcaaacgttttctcgccctttttaaagcctttaattaaatcagtcttttcaccttttaagagctttgtcatattcttttgcgaaattgttttacttaatatcttctttgaaatggtgaaatcacattgcgttgtattatagttagaacaaccgtaaaacgttgacttatcaattacatcgccatcacattttttacagctaccaacctttttacccgttgtaaatttcgatccttttcgttcaatcgattcaacatgtagtcccgtgaaatcccacttctcagacatttccactgcgtcttcaataattttagctgatagctttttcgtctgttccataaatgtagctggtgaagctgtaccttcaccaatttccgcaagacgttgttcccatttcgcagtcatttccggtgaagctagtattttgtcaccaattgcggtaattaatacttttcctttatcagtcgcatacacttggtttttctttacatctatatatttacggtctttcagcatcgtaataatacccgcgcgggtcgcttccgtacctaaaccttctgttttcttcaataccttctctagctcttcattctctaaatacttaccggctgttttcattaacgtaataagttgtccttctgtataacgcttcggtggctgtgtttttccttctttcactttcacctttacaacttttccttcttcaccttcagctacaattggaagaatggtttcgtcatctttatcgtcttggaaaataactttacgccaaccttcttgaatttgctgttttccttttgaaatgaattcagcacgttcatctacaagcgttacaatcgttgtatagtcaaagattgcaacttcataatgagctgcaataagccttcttacgatcatatcgtatattttcttttcatcacctgatagtctgcttgggtttgtaacttgctctgtcggaataatcgcgtagtgatctgttactttcttttcatttacataacgcttattgttcataatggattcaaccggagccggtaataaacctttatattcatcaaactgacttaacttctgtaaaatatcagggaaagtcgctgcttctccttgagtaacatagttagaatctgaacgtggataagaaacaatccctttttgatagagtgcttgcgttatatcaagcgtctttttcggtgaaaacttaaaggctttatttgccgttgcttgcagtgatgataagttgaataaaagcggcggctgaaactctttacgctccgttttcatttccttcacaacagccggtttcccttggcaaaatgccgcaattttattcgccatatcagggtcttttaagcgggattcattatccttctcccatttcccgtcatatttctttccttctatattaaaggttgcaaacacttcccagaaaggctctgacttaaagttttcaatttctttctcacgctttacaatcaatgctaacgttggtgtttggacacgaccagcagaaaatacatcattcattccttttttctttaacaaaatactaaacacacgtgatgcattcatgccaacaacccagtcagcacaagatcttgtgtatgcttcgtaatacgtattaattgtatctgattcatcaagtaaatttttaaacccttgataaatagcttgcttcgttaaagacgaaatccatagacgcttcataggcttttgcacattacaaagattaataatatttcgtacgattagttccccttcacgcccagcatcgcctgcgtgaataatttctgttacctgtggattatgtaacagctgtttcacaacgttaaattgcttatactttgactttgttacttcaaattgaaaacgctctggaatcatcggtaatgtattaagtgaccattttttccactctgcgtgataatgctctggattacataactgcgtcaaatgaccaattgcccatgtacagtacgctccatttggaaataactcattcgcttctacctctaaatatccatctttccggcgatatttaaactgtgaaacaagagccaacccttgatctggtttctcggcaataattaatttcattttataactccctatctgtattccagtgttactttcattgtctatatgtttagaagcgatgataaaacaacaatcttatttatcattcgcggtttgtctcgcaaatgggagacctataatattatacgcttattctttatggcttcacaatagaaactcataatataacaatttctttcacatgcttacaattaaaaaagacgccctaaaaaatcaagcgttcctttgcttacatctatgaaattgtgcagataatatgcagatataaattatcataagtacacatatgatgaaatgaacgataggacaaggaggtatcataatgtttgcttatacgttaactaccttaacactttgctgtacctcaattcttattgtatccaatatttctaaacgtaaggttaccctaatggagtatatggtatttattatgtcttttagtatgagtatcggtttaagtattggtttttatttaggcattctctttaagggggaattactatattctactttacttgctattttaattagtggttttatcggttttttagtgggtctacgttttcacctatatactgctttagaaggaatgttctctggattaatggcaagtatgatgggagcaatgattacagaaatgttaaacgctcaacaagctcatagtatattgttcattagccttttacttactataacgattactatgtcctgtgtgattcaattgttatcggagaacttttctacttttatccaacgtcgttttttgttattcctttcaattagtgtagtaattatcgttgccgtattcgcgacattcccagatcatactcctgcaccttcaccttcacctgggcataatcaacatatacattagtacttgcaacaaaaatgaataagcagctatccataggataactgcttcctattattctggcttattaggaatgttttggtttggaacatagtcagatttataatctgtatagttcacttccgttaccatccctgctgaagcatgatgtaggtcgtgacagtggaacatccactcaccgggattgtctgctacaaaggctacttcatattcttctcctggttttaagttcaatgtatcttttacaattggagaaccttctatcggttttccatctttactcaacacctggaagaagtgaccatgtaaatgcattgggtgatcatccattttagaacgatttaccaatttcacttttactaaatcaccctttttcacttgaattgggtcaatatccggaaatacctttccgttaattgtatataccatttcattttcattcatttgcgtatttaagtccatattatatgtggcagtatactcttgatttaacgtgaaactacctaattttttagcaccatatttcgtcatatctaatttcgctaattttcccttttcatctgctttatctttcatctctttgctgccatcatactcaataacagctttcattccttttgcacctttattttttgaatggtcctcaacataccacttcccaggattattagcagtaaattcaatatcataacgttcacccggtgcgattgaaattactttatcctttataacttttggatcgtttattggttgaccatctgtcgcaattacttttatatcatgaccgtgaacatgtatatcatgtgatagataaccagcattaacaagtcgaagacgaactttatctcccttattcactttcaatggcactactaaatcaccgctttttccattgattgtgaataaatcatacatactcatatcatgaccttccatcttcatatttccatggtccattcctgccatattgccagagtctttttgatcactgcccatgtccataccagaatgatccatgccgttcttatcatcattctttttcgtattttcatcacctttagatttattacctatttgcccttttgtcatttcttttaactgctttttaatttcttctttatctgtaacccattcatccaacagtaatgtgtaatctttatcatatttttcctttgtatcctctacaatgagcgctccatacaaacctctatctaattgatttacagaatcttgatgcgagtgataccagtacgttcctggtacgttcgcttcaaattcgtaagtgaaactttttcctggttcaactgcatcttgtgtcacgcccggaattccatccatgttatttgggacaggatatccatgccaatgaatagatactggtgcagataattcattttttaatgtcactttcaccttttcaccttttttcacccgaatttctggaccaggagatgagccattaaatgtccagactggaacaataacaccgttacttaatttttgcttttcttctttcgctattaaagtaacttctggccctttttcaaccttcaatggtgttgtagctgtttcagtctgtagtgttttgttatcattcatatttttatgatcatttgttgtatttgtcgtcacagaacaggcagcaattaaaaatattacagagacagtaacggctgctaatacaaatcgcttcatggacaatccctccttattctttttcaaaatcattatagaagttgattttcaagaaaataaggagatgtaattagatcttacgtaagctaattggaaaattactaaaagcggagacattacaagagacgaatattttagtaatacaaaatgctttccttgtagcgactatattagccgttctcgtatttgttttgacgttatttcttaagaaacaataacactgctattattaaataagaaaaatgtagctaaaatgctcttcacaaaagaacttagatttttgtataataagaactaatgttcctcacagacaatggactcaaattacacaaatatatcaaatagaagaggattgatatacgatgaaaattgatagaccaaaaatttcaccagagttatcttcaaagaattttcaagatattttttatgaagaagatccaacattggaagtgtgtgaaattatagactccactttcgaaaatgaatctgtagatagagtgcggttatatgatgcggtgataaaaaactgtaagtttactaatacagactttagcaatattgatattacagatgtttgttttgaaaactgtgatttatcaaatgttaatttaagcaattcttctgttcacagagtcgaatttaaaaacagtaaattaatcggagtaaatttcacaggatctagcttaggaaatgttaaatttgagaattcaattttgaatttagcggcatttggaaattctaaactagaaaaaatcatcttcaatgaaacttcattaaataatgcagatttttttgactgtaaacttaaaaaagttgaattccaattatgtagtcttgatgaagctaattttgatcagacatcactgaaggggatagatattagttcttctacctttgatacacttacagtttcagtgaacgatttaagaggatgtaaagtatcgacatatcaagctgttcagtttgctactttattaggattaataattaaagattagtatttcgaagaaaagaaccctatcccgaatcatggattttttaattgtccacgattcgagataaagttcaaataaattagtgatgactcttttattatttaactacagcttggtttccttttacatgttcattatttacactcataaattcttcaatttcttcaacttccctaatgatatcttttgacaagttttcatacccgtctttcgttacaagaatgtcatcttcaatacgaattccaattgattctccttcaatataaagaccaggttcaattgttataaccataccttcttctaacactctatctttatatgttcctacatcatgtgtatctaaaccaaggaaatggctgacaccatgataatagtattttgataactcttcatcttcttgaattaaaccaattgctttacactcttctgccagtaccttttttgtatgctcatttaatgcagcgaactttaatcctggcttaataatctctgttgtttcttttaatgcttttaatacaatattataaatttgtttttggcgactagagaatgttccatttgctgggaatgtataactaatatcagcgttatagtagtctttttgagcacctaaatctagtaatactaagtcaccattttgaatttgtgcatcattatcttcataatgaagaactgtagcatttttcccactcgccaaaattgtattgaacgcatggtacttaattccagatgacttcagtgtaaaatcaaattgtgcttctaattcatactccatcatgcctgcttttgcatgcttaagtacgttgtaaataccgtctttcgttatagcaatcgcttctttaataatttcaatttcttcctctgttttaaatactcgtaattcacaaatgttcggatatacattaccaattgttacgtgtgggtatttttctcttacatgtttagcaaatgctaatgtttttgtctccgtaccattccaatcacgacgttctatatctaaatatagatgcttcgcattttctgtaaaaagtatatttgacattgtcttttcaaagctatctaaatatataactttctttatacctgaaattttctctgcttcttcgttagaaactgttttaccgacccatttttccattactggatctgccttttcaatgaaaagtgtttcttcaacactacttccaacctttttcagcataaaaataacatttggttcatcgattcccgttaagtagtaaaaattacgattcggtacaaatttataatgtgcatcagctgacatatgcggtgcttgtcccgcaaataaaatcgtaatagatccctctggtaatgtgtttgctaatcgttctctattttgagcaaaaaatgttgatttcatgataatccccctagcgttttatgtataattgtgaaactaattattcaatacacttcattctattattgttataatttttcgtcaatttttaactaaattttagatagtattgacacaggcaactaaacaagttacaataactataaattagtaagttgctaatttaaatttaaataagaggtgaacaaaatgcaaaacattttattccgtattaacgaattgtcaaaaaaagaaaaagcgaatggattaacagttgatgaaaaacaagaacaacaaatgttgcgccaaaactatacacaaacatttcgtggaagcttagattccattttattaaacacaaaaattgttgatcaaaatggtcttaacgttacacctgctgcattacaagatgctcaaatacgtttaaaattaagcaaatgagttccgagctaaagaattctaataaaacataaaaagagctggatttcctatatagaaattccagctctttttattttcttttttaatttagtaaacgagcgatacatcgcaattctccacgacacaatcatcgcaaatgcaagtaagaaaaacattccacttaactccgctaaatcaatcgattgacttaaatatgatttcaacgctactcgtacagctaataatccgactaaaataaatataaatgcttttgacggtttcatatatatttgttcgtctcttatttcaaacttcgttgtttttataagaaatacagagaaaataagccctgcaataattgcttctattatttctaacgacgttaatcggaattccggtaaaaagtacatcattgctccagtactcataaaaattggcggcaatataattttctttttcgttaccggttttttcgctgctttaaagcgcagaaacatgacaccaacagccatacaaaccgctaaaatacttgataaaagtgctatcatactcttcccactcctatctatttaaaagactttttgagcaaaatcataaaccaaacgagcccgatacttataataacatgacctaatccagccatatggcttaaaccgtaaaagtcagttccatttacttgtagaagacctctccatagcattgtaacaatagtaaagattactcctacattataaacaacaaaccatgcacaaaagctctttgtttcttgtacatgaaacactttacataaagctaaagcaattaaaaagaatacaaaaccgagcactaatacatgtgtatgcactaattgcaacattgtggatcctttaattccttgtgctttcgaatactctcttgcaaatacacctgataataaaccaataattaagtaaataaatgccgcattatataatttcttcattctattcctcctgttgtaaactttctatattcgctgcaattattttaagcaaagtttatgaacggagtatgaacaaaatattacattcaatttttgaaaataaaaaagccattccacaaataataattgtagaatggcttttcaatttattttaaatcttctattgagaaagcacctggcagtaactgctcaacagtcacttctttttcatcaccttttacattcgttaataatacaggcattttcgggtcacagaattcagcaattacttgtctacacgcaccacatggtgaaatcggtccatcagtttctcctgtaataactaagtaactaaaatcgcgctcaccttctgatactgctttaaatattgctgttctttctgcacagttacataaaccgtaagaagcattttctatattacaaccagtatagattttcccttctttcgtaactaacgctgcgccaacaggaaatttagaatacggaatatacgctttcgataacatcttgtttgcttcttcaatatattttttcttacccatattatttccccctcaaagtaaacgaaatgatgattagtcagtaataactgtatgaactaatttaggagccactgctgtttcagcgatagagatgttctcataaatttttgcttttacatcttctacattttcacgatttgcgtagattgttacgaatggctcgccttcttttactgcatcgccaacttttttacgtaacattaatcctactgctaaatcgatttcatcttccttcgttgcacgacctgcaccaagtaacatagctgcaataccaatctcatctgcaacaatgttagaaataacacctgaagtttttgcaggtacatcaattacatacttcgcctgtggcattttttctggattgtctacaattgagctatctccgccttgattgcttaagaactctttaaacttctcagttgcttttccgtttttcataacttcaattagcatttcacgagcttcttctaacgtatttgcttttttcgcaagtacgaccatttggctacctaatacaagtactaattctgttaaatcttctggaccttcaccttttaacgtatcaatcgcttcttttacttctagagcgttaccaatcgcaaaaccaagcggttgtgacatgtctgaaataacagccatagtttgacgtcctacattatttccgatacgtaccattgcatgtgctaattcttttgcatcttcttctgttttcataaatgcaccagcacctgtttttacatcaagtacgattgcgtcagcacctgctgcaatttttttactcataattgaacttgcgattaaaggaattgagttaaccgttcctgttacatcgcgtaatgcataaatctttttatctgcaggtgttaagtttcctgtttgtccaataacagctactttgtcacggtttacaatatcaatgaactgctctttcgtaatttcaacgtggaatccttctaccgcttctaatttatcaattgttccgcctgtatgtcctaaaccacgaccagacatttttgctactggtacatctaaagcagcaactaatggtcctaatactaaagttgttgtatcaccaacaccgccagttgaatgtttgtctactttaattccttcaattgctgataagtcgatcgtttcaccagactcaaccatcgccatcgttaaatctgcacgttcgcgatctgtcatatctttaaagaagattgccattgcaagcgcactcacttgataatcaggaatacttccgtctgtatatccattaataaagaatttgatttcttcagtcgttaattctttgccgtcacgtttttttgcaataatatctaccattctcattacaatcaccattcctttttatatgatacgaatctattaaaataataagccaacgattgttgctgataagaaacttactaatgttgcaccgaatagtaatttcaaaccaaatcttgcgactacattcccttgcttttcatttaagctcttaaccgcccctgcaataatcccaattgaagagaagtttgcaaatgaaactaagaatacagatataatcgctgtcgttctatctgagaaattaaagtttccttgtgctaaatctgtcatagcgacaaattcattcgatactaattttgttgccataatatttccggcattaactgcttcatgccaaggtacacccataataaatgcaaatggtgcaaatacataaccaagaatttcttggaatgaaataccgattacacctttaaatactgcattaatgaatgcgataagagcaacgaaaccgactaacatagctgctactgtaatcgcaactttaaatccatcaataatgtattcccctaatacttcaaagaaagtctttttctcttcttcttgtacttctaacatatcttcttcctcagtaacttcatacgggttaatgatagaagcaatgatgaagccaccgaataagttaagcactaaagcggttacaacatattgcggttttaataacaccatatatgatccgacgatagacattgaaacggtagacattgcagatgcacataatgtatacattcttttctctggcaataaccctaattgtttcttaactgaaataaacacttcagattgtcctaaaatcgcagaagcaactgcattatatgattctagtttccccattccatttactttacttaatgctagaccgatagatttcacaataataggtaatactttaatgtgttgcaaaatacctattaaagctgatataaatacgattggcattaatacacttaaaaagaacgaaaactctttttgatttactaatccaccaaatacgaaattcacaccatcagcggcatattttaataactctccaaaaccatctgctattccgctaattaatatattccctacacttgtatttaataataaaaaccccaaaataaattgtaatataaccatcgttatgattgggcgatatttgactttctttctattattactagcaagccaagcgatacctaaaatcaatacgaggccaaaaataccaattaagtatttcataagccgtctcctcccattcgtatccgcttacatttttttcaattattaaagcaatagatacactttactttgtgtatctattgctcttcacttcattaatgattagtagttatctgtagcaccttttgcatcatttaatacgattgcaacactagcacttgctccaacgcgagaagctccagcagctaccattttgtctgcatcttcacgtgtacgaacaccgccagatgcttttacaccaacgtttggtcctactgttttacgcattaatgcgatatcttcagcagttgctccgccagttgagaatccagttgaagtttttacgaagtcagcaccagcttttactgataattcacaagcgcgtactttctcttcatctgttaataggcaagtttcaatgattacttttacaagagcttttccttttgctgcttgtactacttcataaatgtctttttcaacaagttcgttgtcaccatcttttaaagcgcctacgttgattaccatatcaacttcagttgcaccttttgcaatagcatcttttgtttcaaatgcttttgtttcagtcgtgcttgctcctaatgggaaaccgattacagtacaaacgtctacatcatgtccagctagttcatcagccgctaattttacccatgttgggttaatacaaacagaagcgaatttatattcctttgcttcttcgattactttcataacatcttctttagtagtattagcttttaaaattgtatggtcaattaactttgcaatgttcattatcttcactcctcatatcttttaacaacttcattctaactcttagttgaacaaatgtaaatacacttttgaaattttgttcattctttttaaaaggaatcatcttgtagtaaataaagcgcattctaacaaagaacatttcagatatataatcaaaatttttatgttaacaatggtagtatgtatctccatatccataattatttttaaaaaggcaatttgtgttcaaaaaaactcctatcattcatacataacaaaataaaaggcattctcaaaattaacatcttgagaacgccttttatttctaatctttttgataatgtaataattctttcgctgtatgctgatcgataattaatacatttgcatacccgccacgtaacgcaccatcaattgcttttatttttctattaccacctgcaactaaaatagagcgtttctttaatttcagttcctctaactcaattccaattgtacgctgattaatctcttcgctactaatatttccgtctccatcaaagaaacgtgaacaaatgtcaccgaccgattgttttttgagtaaacttgtttcatccttatcgaaataacctaatcggaataatagcgcttcgtctcgcactgttcctacagtgaaaactgcaatattcgcttgtttccccatttcaataatgtgatgaatatgtcgatcctgctctactaattcttttgtcactgcattatcaaatataactggaagaggtagatttcttggcgtcgtttgaaaagcatctgcaaataaagctatcgtctcattcgcatatgtatttacacttgaatgactaataccaccttttagctggacaacctccaccccttttacatgttgcggtacgatttttctagcgatttcatacatagtcatgccccagcttacaccaacaatatcaccgtttttaaccgtcttttccatatactcagcagcatatttacttatatactctgtaatcgttgcatattccggcactggagaaaatacaacatgtgcctctaacaagttgtacttttctttcagtaaattcccgacgttatctaaatcagcaaatggatcggcgatgctaatttgaacaaaccctttttctttcgcgtactttaacaatctagaaatcgtcggtcttgaaatatttaatttgttagcaatttcttgctgactataatctgattgataatataatcttgcaacttcaacgcttaattgttgtttatctttttccatagtaactcattacaaatcccttcctgtatttccctttcgttacaagcattatacagctttatgcaaaaaaattcgactaccgaattttatctatctgaacttctactacacttaatatataatgaaaacttattgtgtagatttacaaactcaatatagatacgcttgaaacatgtaaatcaattaacatttaattcacattttttctgtagtaacgataacaaagccgttcaataagaaacatgaaacatcatctaaaaactattcaaataccccttataaacagaagttactatttataaggggtatttactcaatttaattttataaaaattggatggaaacaatgcaagttctcacttatttagaataagtgaaaagatgatgttttatttgttcaataaaataatgatggtgtatattatcgttagatactcgacttgccataatagccccctccattgaagaggcaagaaaggaagcgagtgatataacctctatatcttctttaaattcttgtttctctattccttcttttatgagagaagccattaacattactgtatcatcataaccttttgctgctgctttttgtaattctggaaatactccagtactttcaatggcactattaagtaatggacagcctccagcaataggaggattattagctgcatcttgatatacaaggaaaattgcaaggattttatcaattgctgtctttttattttccattgctttatgaaaatgactccacataatctcaccacttttgtcgtaggcagcaaggacaatttcttctttacttttgaatctacgataaatagatcctttaggtagttcagtagctgtcattatatcctggatggatgtgcgagttatcccattagtattaaataaatataaagatgtttcaataattttttctttaaccttatcaactttagtcatgctttgtaatcctcctaatgaaaaccatcctaatattctaggtaatgtttaccctctattttcttaatttttttgtaagtataaataagtttggaacagaaatatcttatcaatccctatcttatggaaacctcaaacaatacagtttgaaaagaagttaatcaaattgtattacctacataaattaagtgaattttccgtcaaaacaacatgaccaattgtttaattcagtcatattatacaactaattttatctaaaatcgtagaggtgtaaaaatatatagttaattttaatgtatagacatatgattattatatataatttttatcaatatgtttagctaaagtgtttgaactactcccactttcacttcattctataaaagattaaccattaatgattactggaattaaattgtaacaaagcaactgaaatataaatatatttgcttttttccattttgattttgttaatactttataaaaagggtttaaaaaactagaaacttgtagtatcattagatttcgattcagaccgaaccgtccggtttataatcttatataaatatatttagaaggagagcgttatgcagaaagaaaaatcaaaaattataggtaatttaattatgggggcaatacagtgaactttataaaaatgaataaaaaagaaatcattatgctaataatctttacactgtttgtaccatttcaaattggcttgtacatactatttggcatatcacttttagctaatgtcaatttagttgaatcagaatttgttcttagtgccatcggttttactgtacctgctattgtaggaatcatttactttaggaaagaaattattgaaagttttacttattttaaagagaagacaattttgaaaatagtaagtattcctatggtagttttatttacgttaattgtggaacagtgtgttatgcattttctagcaactggtcaaccagagaaccaagagcagctccttgaaacgggtgcagaggtacctcttgtatttacattgcttgtatttggtattctgggtccaatacttgaagaaattgtgtttcgccacatattaataaatcgtttttcttaccatattggtactgctattgcatctatcatttcgattatgatttttacacttcttcatacgaaccaactttcggatattgctatttatttacctggatcgttgatacttactgcggcttatcttatttctaaaagatccattgcatatgttatagcgatacatatgttaaacaattgccttgctttcattctgtaagaaactagacttgtttctgatgccaaaaatattctatgtttctatcaagcatttttggtaccagaactactttttctatgacataagaaagctaatcaaaaattataaaatattaggagagtgtcagtcatgattgtaacaacaacttctggaattcaaggtaaagagattattgagtatattgatattgtaaatggtgaagctattatgggtgcaaatattgtccgcgatgtattcgcttccgttcgtgatgttgtcggtggccgtgttggtgcttatgaaagtaaactaaaagacgctcgtgatattgcaatgggcgaaatgaaagaacttgcaaaagaaaagggtgcgaacgctatcgttggtattgacgtagattacgaagttgttcgtgatggaatgttaatggttgctgtcagtggtacagctgtacgtatataagtaaataaaaaaacggttcctcttggaatttatactttgaggggaaatcctgattctgttgcagattttaaagaataaaacgagaaataatcaacttttttatttctcgttttatctacatatttatttttggaaaaacaatctaactccaaatactaataatacggcgcctgtaataccctctattgtacggttcactctttcttttcttaaaaaagttcttaattgacgtatgagtgagatgtaaagtaaataccatattgctgtcaaagtcgtaaatgtgagtcctaacaaaagaaattggaagaaatgattttgattactcacaataaattggggtaaaaaactaaggaaaaatacagcggtttttggatttaaaattgccgtagtaaatccttgtctaaagcttttaattgccccaatatccttagagtccatttctgctgaacctgacatatcttcttttttatgtaaggcacttttaattgactttacagctaaataaattaaataaacagccccagcatattttataaatgtaaataacatagcaaatttcattaagatagcagaaagtcctaacgtagccattattgtatgaatcatcattccagatatcgttcctaaaacagtctttatcccgccatttttaccatgcgagatagtattttttgtaactagtgcaaaaccaggaccaggcatcattatgattaacattgctgtaaggataaataatagataattttccatgttgtagtatttcctctccaatttttagttttgcttacagtatagcttttttcattaaaacattacatataaaagacttgatcagaaatgtatttaggttattcgtatcaatttgattaactattacccaatagccacattgataaaacacatgacaaacttatatataattgcaagctcaactctcacaaaaaaacaggatgaaaaataaacagcagaactagtccactgtttactttgccacaccttcatgtaatttttctgtataatcttttacatctttccagctatctttcgctgtatgtaaatcttcttttataaacgtaaactcttccggactaattccttttacgttttgtaataaattattatactttgcacctactgtataccattgatttgatatgttttgtagtgctgtaattgctgcatcaattgtttctgtcatgtttgttgttttattttttacatcagtcaaaattacgacttctgcttgtgctcctgaaattctatcttttaaattggcgatttctctttctgcatttgcgatatcttttttcgcaaccgcaatcatcggcccgccagcaagacatgttattagagctacgcaaagtacgccaccagcaatgaccatatcattactctttttaatcgaatcgttatatgtatttatttgttgctctagagctggaataccagcattcgtacttgccaatatcgctgttaactgatttgtatcctctttgaaactatttgtatctttcgccattctatcgcgaaaagctttcaaatttcctaataatccatctacctcattttgattctttacaatatccgcatacaacttttctaaatccgcttttaattttccactatccttttgatcaatcgctattaacatgtcattataatacgattgaaaagtattattgtaatttataatattttgatctgttttcataatttgaggcttcatattatttaaccaatatgctgcattaatttttgcatctctttgatgctgaatcatactccctttaaattcactattaatcgaacttattttacttaaatccgtctcttgttgattttgaattaattttgcatatgaatccattgcaaatatgcttgatgtcgtttgtgccattacatcttggaatcctgctggtccaagagaatagtttttcacattttcttgtagcaccgttacattttgttctgctgcaaaaggatgtaaaggaaatgcgttactcgttgccaccccagcaatcattaccgctaaaagacattttttataaaatcgtttctgcatatttttcacctattctctttataaggatatcaaaagctcctgctcacaactgaacaggagcttcaaatcattcatcaacacttaacgccctaacgattcgtattcgattatgcttttttcgtatctactactttaatatcttcagcataaatcttttctgcatagtctttaatgtttttccagctatctttcgcaatgtttaaatcttctttaatgaaaacaagatcgtttggactaattgaatccacattttgaagtaaagaattgtattttgatcccattgtataccattggtttgaaatgttttgcaacgctgtaattgcagtatcaatcgtatttgttaaatactcagtttgtgttttaatgttcgttaacccagctacttctaattgagcagttgtaatttgtccagttattttttgaatttcagcttgtgcattgtcaagttctttcttcgctaatacgataccagctgtaccaccgcctacagctgctgcaccacctgcaattaatgcgactcctagcggtgttcctgcgcccgtagcaataactactgcaccaccaataattgcaattggtcctagagctgtcgcaacagatgaaccgataataattgcattatatttactaattgcttcattgtacgttgtaatttgattttgcagaagtggaatccctgcatcttgactagctaatatagatgtaatttgatttgcatcacccttgaagttttgcgtatccgacgtcattttatttcggaattttttcaagtcttctactaactgatccacttgcgctttattttcattaatactacttgataatctagttaggcctttcgtaagagtcgctttatcttttgcatctaccgcagcaactaaagtatcataatagttttggaattttgtattgtagttaatgatgttttgattcgttgaaataagctgtggctttaatacatctaaccattgcttcgcatttcctctagctgtatcttggtgctgaatcacttttccttttaaagctgcatcaacagtcgatacatttccaaagttaacattaccttgtttaataattgttaaagcatacagatccattactaaagcatttgaacctgttctttccattgcatctttcaaaccttctggtcctaatgaatattcttcatagttattataagcttttgctaccgcatgaactggagcttgtttcactgtactttcagctgcatacgtatgagccggcataatatttcctgctgcaaatactgccataagtgctgatagagccattactttatatggtttttttgtcatttttcttctctccctatatcgctaattatttttctatttaatgtacttcaacgtttgtaacgtaatcttcaaattgatttgtttgcttattcatttcatcacttacttttttaatttgattaaaatgtttttgaagtaaactactgtctgtatacgtgccttcttcaacatttgtttgaatttgaatcatattattatttaaaactttccaatccgttaataacgtttctaaagttgtaatttgacgatcaattaattctgtaaagctatttacttgatcttcaacgaatgtaatttgagtcgcctctgcttcagtttgtgataacttttgaataagtggcaataactctttttgcttttgctgaatgcgaaaagctgcttctctcgtttgactatctgcagcatttacaatttcattacttaaagtaccgatagaaacaaaatcgattgttttcgtttgtgcagtttgatttgtgattgtaaatacttgtttaccgatattaatagaacctttaattatttcttgaggtctattcaaaatagtagttagttcagcttgaatttccccttgaattcttttaatatcttctcttaatttcacaatatctccacttgatccttgcagtgtttttattgcttcatcggctttaattgataagttgttactatctttgtctaatactgttttaaatcgatttaactctaataaatcttgctccatactctcttggatgctctgtacttgcaattgtaattttccatatgcactcataaaatctgtttttgcttgctgatcttcatttacatttcctgctagttcatagagcttactataataactattgaatctagtgctgtatctcatcatctcttgatttaagtcaattagcttcggattatattcatcaatccactctcgtacattcgcctttgcaaacttttgatgattcgttaagctactcatcgcatttaccttaatgtctggctgttgcaaaataattaatccgtatgcttgaataagcggtgattgtgatcctaacattctaattgaattggataatgtatttggagcaattacattttgcgcatatactgttttcacttccgtttgcccctccttagcgtaagcgcttacaggaatgaagcaactcgtagataccgctgtaaccaataaccctgtaattaaagtctttttcactttaactcctcctatgtattagcaactattactatcgcattttattattctattttcttgcccataatttgagatggttaaaatagagaacgttctcaacgtgatctatgtatgaaccacctctctcgtattgctacagtacttacttatcgtcacaaaacatttcattatttttcatatgtgtttagtatgaataatattgtataaattttctatttcatcgaaattcccacattcacacagtgaatatattacataaaaatattattcattttaaactaaacaacatacgtaaatatgaaatttcattttgttttcatataagttttgtactgtaaggtcatttaaacacagctgtttatatatcgtaaagaagtattttcattccctttattttcaagctttcatgtccttatttcaaaatataatccgattcactttatcgattgaaatatctacatatcacaacagaaaacactactttcaaataaccaatgaagttatattagtataatttttaaccccatatgcaattatgcatagcatatacacaaaaaggatagcttcattttcgcgaagctatccttaaaaaattttcttattttttcaaatgatatggaactgtcgtaataacaacatttcttttataaagtaaatacgcacgtataagtaaactggattgattatgaagaatgttatgccaaccttttttcggaatgaactgtggtataacgaccgtaacacggtaattcgattcacttgccttatattgcactgtatcgataaacttcgttagcggctgaataatacttctataatgagaatgtaatgtaacaagccttacttcaggttgccacttcttccatttctcctcaaatttcttttcctcttctctgtcaaaagcaacatatactgcgataacttgatctgccgaaagcgatttcgcatagttcaatgaattttctactacatgcgtcatacctgctacaggaacgacaattacattcccctcaattggaataagaggctcgcaagtttttaaacttaattgatcacccactgcatcataatgcttcttaattcgatggaataagaagataataactggtaagaaaataagaatcgaccaaacttgtgcaaatttagttaaaaagaacatgctcattacgataaaactaataactgcaccaattaaattaaccgttaatcttaaagcccatccttcaggcttttcgcgaagccattttaataccatccctgtttgagaaagtgtaaatggaataaatacacctactgcatatagtggaattaaatgttctgtttgcccttggaaagctacaattaaaataatcgaagcaactccaagtataataataccgtttgagtaacctaggcggtctcctctaatcgtaaacattctcggtatgaatttatcttttgcaaggttaaccgctaataaaggaaatgcagaataacctgtattagcagcaagaattaatattaaagctgttgtaccttgtatgaaatagtacatgaaattacgtccaaatgtttgttcagcaatttgagaaacaactgttacttctttactcggagtcactccgtaataataagctaaaaatacaattcctgaaaataacacagcaagtaatgcacccattgcaagcaatgtttttgcagcattgtttggcgcaggatctttaaagttcggaattgcatttgaaattgcttcaacacctgttaaagcagaactacctgatgcaaatgctcttagtaataaaaataaactaatccctgcaactggtgtaccaattggcgcatgtaaagtgggtgaaacatgaccagttaaaatattatatatgcccacaccaattaatataaatagtgctaaaacgaataaataaacaggatatgctaaaacggaagctgattccgttactccccttaaatttaatatcgtaattaatataacaaatataaccgcaataattacgttgtgtgcatgtaagctaggaaacgcagacgtaattgcatctgtaccagcagacacacttaccgcaacagttaaaatatagtcaactaataaagatcctccagcaattaagcctggattcatccctaaattttcttttgatacaacatacgctcccccgccatgcggataagcaaaaataatttgacgataagataaaataagggctgtcaataatactaataccccaacagcgatcggaatggaataccaataagcgatcgctccaacacctgctaaagcaattaaaatttgctctggaccgtaagcaactgatgacaatgcgtcagaagataaaatagctaaagctttcgttttattaagcttttgttctccaagctccgttgattttaacggtcttccaattaaaaatcttttaatagatgaaaccaatgctgtccactctccaataattttgtacgaacttttctgcttgttgcagccagtaaactatttactcagaaaacaaaaaatgtctacaagccatagcgaaatagacttgtagacattattttttttgtcgcacaagctccaccttccttctcaatataacgcttacgaggttagctgtcggattcgggcctatgagtagccctaccttttttaaggattcaccccatcggattatgtactaatccgtaaaaacgggtcccccgtaccatgcggtttcagcgatttagaaaattgaaactgtggattataatactcctttattttcaaaaagtaaacaaaaatttttaataagaaaaaaattaaaatgattgtgcataatccactgagaaatatacataatgaatactaaaaaatccgcaaaggagacccctatgtctaaagaaaagaagcctattttttccgattcatatttagatgcagtagcaaatgaaattaatcagttatatggtaaacgtgaacaggaaataaatttgacagatagaacgaaaagaaataaataatttgtcatacaaaaaaataaaaaagatagcaatacacttatatattgctatcttttttattttttcatacatctaattctattacagatctgttaaaggtcatctcttcatacacctttaaattttgatatatagtgcctaataatggtgccgctatagaaaattgctctgctacatccagtaaatatccttgcaagtgcttcccttcaataaacgaacccttctccatatcacgttgcatcgatgacttcatatcatacgaaattttatcaattgttttcatatgttcctgggcaatattaacctttattggagctcctaatactttcataatttgtacagattcctcaaatacattacggataaaatcacggccgccttcactttcacgaattggtccaattggtgcacgcattaacgttgtcacaccggacattacagtaataaataaatatttatgccacatatcttgcgtaatattttcacttaaaacaaaactagatttcgtacctgcaaatgctttagaaatatgctttactctctctgaattttgagacttaatttctccaaacacaagtctgttggcagcgctagtttgtacaatttctccttgatcgtttaacgtcgtctcgataaagcataaaccgccaagtactttttcttcgccgaattctttttgtaatagcgataaatgagcgataccatttaacaatggaatgattacagtattttcgccaacaaacggcttcaaatcttgaattgcctcgtttaagtgatacgcttttgttgaaaataaaatgacatcaaatggagaagttctctcttctttcgttattaaattcggttggaaagagaaatccccgttaacacttcggattacaagtcctctttcctctaattgttttttccgtttactacgaacaagaaatgtaacatcttctcccttttcgactaatctgccaccaaaaaatcctccgactccaccagcgcctaatactaaaatccgcatacagcatcccccttttcaaaatacaattttataacttttagtatacataacattatacatgtcctctgctaaataagctgaattttcactctcaatcgagtataaaacagtggttattttcaaataaatttgggcatgttgtttctatagcatatatggaaaggaaacaatgtagatggaggcaatacaagcaattgaggaaaaagatgtagcaacagctatatttcaatttatattcccgttttcgtttaaagctggatatgaacaaaatatgttccctttcttacaaaaaaacgatttccgtccttttcggctcgatcatctctatgatgaaaatacatattatggggagtttaaagtttcacatcaaaatatggaagcatactatctttcatttacaaataaaattctctttcctcactcagagcatcaaaagggcttgcaacgttattcaaaggaccttaacttaactggacatttaacaacaaaccttatttcaatcccattcaagatacactctattgatgtaacactttgtccttatgaacttggcttcttaacaattcgaacagaagtaaacactgctccaagcatgactttatctgaagcaatcgaattcgctgctcgcttccgtgtacttgaaactaaaaatgatacaaatgagactatttgtattggatgtaacggaaaaaagtattcccaagttgaaaaattcatttttggttatttatttcatggcgtaactgatttctttgaaaagaagagattaagaagttcatactttcaaaccttccctttcttcgaagaccaaagaatgtacgtccaaactttattgtcactaaaagaaggtatggaacttaatgaagtggatgtttatcgtacttctagtctttccggattaacaagtgatggtaagccatatgtgagtgcaaataaccttccttacattcatgactatttaaaaaaacacgcttaccagagatgggctccaaatcgttatttcataatggaagaacatatttttacatgtgtaacaaatgaaggagaacgcgaaatcgctaaacttgctagtcaaatgtacggagaattttattacgctttattattaaacctattccataaaattgttttattaaaaatggcaaacgcctatgctgagctaaacattgaacaagatactaatgaaatagagaaattaatttattcgatcaattcgttcactgctaattatttttctttagaattagtatcccaatcacaaagtgaagatattttctttcgtttaagaaaactttttaatattgaggttctatactcgaacgcgaaacaaaatcttgatagtttgtttaaatatcaagaaaatgtcgcctctaaaaaagatagcctcttattattaattttaacgctctactctgtagtgggccaaatgttagggtttactatgattgaccttttaagaaacaccgattcaaacaaaatatcgtcacctcttgaatttttcgctctattaattgcgattagcggcattgtcatttcacttattttaggagctcaaagtttataccaatggggtttacagcataaacgaagaaaagcttgggtaaaacaaactgtactttctgccgttaaagagaaagaagataaaaattaaagaaggttattttcaaattcttggcgcgctgcagtaagtgaaatctttatcagcgattttccgattatatcggcgcaactcgaaatatatcagcgatttttaagatatatcagcgcaactcaaaatatatcagcgatttttaagatatatcagcgcaactcaaaatatatcagcgatttttaagatatatcagcgcaactcaaaatatatcagcgatttttaagatatatcagcgcaactcaaaatatatcagcgatttttaagatatatcagcgcaactcaaaatatatcagcgatttttttaatatatcgacttaccgacaaaaaccgacaaatgacagaaccgtataataaaaaaagggtgctccaaaattaaacttggagtaccccttttactataagaattcagtttacttccctgcttcgatttgctctaatgcagcagctacttgctcttccgttaattcatgttgtattacgtagcggttacgtggacttacacgacattcattagaacatgcacgtaaatatttcgcttcgttttcttcagaacataaaattttcttattacattctggatttgaacagtttacatagcgctcacaaggttcacctgtaaagtggtctttaccaacgataacatgttctttttggtttactggtacagcgatacgctcatcgaacacgtaacattgtccatcccaaagctcaccttgtacttctgggtcttttccgtacgttacaattccgccgtgaagctgacttacatcttcatagccttcacgaactaaccaaccagaaaacttctcacaacgaattccgcctgtacaataagttaaaatctttttaccttcaagtacttctttgttttcacgaatccaatctggtaattcacggaaggattcgatatcaggtttaatcgcacctttgaagtgacctaaatcaaattcataatcatttcgtgcatcaatgataactgtatcttcttgtttcattgcttcataaaaatcttttggctctaaatacttcccagttatttcgtgcgggttaatgtcatcttctagacgaagtgtaactaactctggacgaggacgcacgtgcattttcttgaatgcatgaccatcagcttcatctattttaaatacgataccgtcaaaacgtggatcattgttcattgcttccatgtatttctctgtttgctctacagttccagaacaagttccgttaataccttcttttgctacaagaattcttccttttaattcaagtgaattacaaaatgctaaatgctctgccgcgaattcttctgggttttcaattgttgtgtacatgtaatatagtaatactctgtatggttttgtagttgccaatgtatttctaccacctatctaattttttaaatcatgtataagttaacgttcatatcaaaacatatataataagaaaatgaatcccattttcttttctttatactattttctatcagttaacaaaaataaaaaacaagattacacaccaaaacactatggttatgttgtaatcccaatatattatatatcatacaaatgcaattccatcaattaatatgctgtattatcagctttatgttcacataaatttcaaaaacagccctttaattcactatgtttccccacgtcatcacaccataaactcccaattcattttacgttatcacaccatccattgcataaaggcatataatttgcattaaggaaactttcgtgttcaaatgaaattaccatataatatatttaaatgtattgaaataatgagtaagaataaatacaataatttcatcaagttaacattttaaaggggaaaactactatgaataaagatataacaaaagatgaacatctcccttctgaaagtacaactgtacaatcagctcacttagctttaagtggagaaacaaaaggctggaaaagactgttaccatttttaggacccgcttttatcgcgtccgttgcttatattgatcctggcaactttgctacaaatatcgcagctggttcacaatatggatatttactattatgggttatactcgcttctaacttaatggctgtattaatccaaactttatcagctaaattaggaattgctacaggaaacaatttacccgaaatagctcgtgaaaactttccaaagcctgtgtctatcggcttatggatacaaggtgaactagttattatggctacagatttagcggaatttattggagctgctttggggctttacttactatttggaatcccgatgctacctgccgctttaattactgcagccggatcatttattattcttgagtttcaacgtagaggatttcgtccactagaagctattattacaggaatgattttcattgtagtaattgcttttgggattcaagttttttatgcaaaaccagaattaagtccccttctttcaggactatttattccaaaattccaaggtgtagacagtatattacttgcagcagggattttaggtgcaacagttatgccacatgcaatatacttgcattctgcattaacacaacgccgcgtggtcggaacaactgacgaacaaaagaaaaagatttttcgtttcgaatttatcgatattattattgcaatggttattgctggagcaattaatgcaagtatgttaattgttgctgctgcactattctttaaaaacggcttgcacgttgaagatttagatgttgcttacactcaatttaccaatttagtaggtcctgtatcggctgcattatttgggattggacttttatcagcaggactatctagctcttctgtcggtacaatgtcgggtgatattattatgcaaggtttcattcgcatgcatattccgttatacttacgccgatttattacaatgattccaccattagttattatcgctttaggtgtaaatccaacttacgctctagtcatgagccaagtcgtcttatcattcggtattgcatttgcgctagtaccacttattatgtttacaagtaacaaaaagattatgggtgcactcgttaaccaccgtataacaacatttatcgcttggataattgcagcactcgttatcattttaaatatcttcttactgtatcaaacatttgtaggataatgaaaaagggtattccaattttaatttggaatacccttttttcattatttgtattaatcctataaagtctttttaaaataaattttataatctatttccagccaataacttccttacaccttgaataatctttattttcagattaaattatataataacaaatacattctattttcatgtgaaaaggagcgaaaatatgtttcctttattaaaaactgaaagactcattttaagagaacttaccaaagaagatgcaccgcgtatactacaatgcttttctaatactaatgtactgcgctattatggccaaaaaccgttacaagatattgatcaagtgaagcaaatcattcataattttaagttgagttacaatgcaagaagcggtataaaatggggaatcgaattaaaagacacgaaagaactcattggtaccattggttttcacgattggtcttctgagcataaacgagccaatataagttatgcctttttgcctgaacactggggaaaaggatatgcgactgaagctgtttctgagattatatcatacggtttccatacgattcatttaaagcggattggagcaattgtatttcttgaaaatgaagcttccaatcaagtactattaaaattaggctttgaaaaagaaggcgttctaaaaaattatatgtatcaagatgatgtcccatatgatacgaatttttacgctttattgaaatcggtttaatagaattcatgtgtaaaaaaccttacttttaaaaagtaaggttttttgtatttattcattagcaatataagcattcttataagtataaataccaccaaattgatgcttttcaattccttttacataatccttttgtacatatgctgagccaatatgataaagcggcgctaccgcagcatcttctaataatacctgctcggcttctcgcaacgcttcccatcggttttccgtatctagtacaaaatccgttttcgctttctttattaattcatcgtaatgaacattagaataattcattttattattcggattccctgtcgtaaataactctaaataactaattgggtctttatagtcaggtccccaatttgccatagttatatcgtaatcacctgtttgttctaactgtaatttttgcttaaatggctgttgtttaatttgtatcgcgattccttgcaaattcttttctaaatcaccttttatatattctgccatccgttttgcattatcttgttcaaacgttaaaaactcgaggtttacttgctctacttcaagctcttttttcgcttctttccaaatcttttgcgcattttgcaaatcatatgaagaaagatctccgttttcttttctaaaatctttaccggtcacttcatttacatgaccaactggtacaagcccgcttgcaggttttgctccgttattaataaagtgagcaacaaaatcatctttatttaacgctaatgaaatagattgacgcacctttttatttgctaacgcggtatttttttcattaaaacgaagcatggcaattccaggatcactcgacatatgtaattccttattccctctatacttgtctacaatttgcgaattaataggtactcgatccaaatctccggcttcatataaatttacagctgtcattgtatcctttacgatatgaaagtttatttcgtctaatttcactttcttttgatcccaatatgtagcattcttctttaattgaaactcttgttcatgcttccatttttctaatacaaatggcccgttatatatgagattactaggttccaatgcataattgtttccttgttctttcaaaaatgattcatgctgtggtaagtatataggtagtgctaacaactgtaaaaaatacggaaccggctgttcgagttcaacttctaacgtataattatttattgctttaaccccaagtgcatcaagaggcattgttcccttattgatctctttcgcatttttcacataaaagagcatggacgcatattgagatgctgtttcagggttaattgcacgtttccacgcaaatataaaatcatttgctgttacactatccccatttgaccattttgcatctttacgcaagtcaaatgtatatttcttaccatcttcacttcttttaaacgattttgctatggctggagtagactgatcttgatcatttaatacatataacccctcaaatatattctgcataacgtgggctgatgtaccatccattgttttcgcagtgtccagagaaggaatttcttctgatactgttacatttaacacttgttttttaacctctgtatcacttttattcgctttattattacaagctgttaataataaaaatgtaacaagtgccattaccattaaatggctcttttttcgcttcatgagttgttctccttaaatataaaatattataaagcgtaatatattatagcagaaatactaacagaaagatgcgacattcttttgaatatttattcgttcaagaaaaaagctatcctttaaaaggatagctttttcaactgccacataattatctatctttgcaaacctcgtttataacgacttgcttcaaatataatacgctcttcatctaacgttttacattcgccattccaaacgacatgttttccgttaataattacatcgcttatatcttttccactagcagcatatacaaggtgtgataacacttcatccgctggttgtaaatgaggcttattagacggatcaattgtaatgaaatcagcacattttccaatctcaagtgatcctgtttgtttcatcccgattacttcagcagctccttttgtcgcaagtgtaagagctgtttcaactggtaaagctgttgcatcttggtgaatacctttttgtagtaaagtcgctatgcgcatttcttcaaacatatctaaattattgttagatgcaacactatctgttgcaattcctacttttattcctgcttctagcatcgcttttacattcgctataccagaacctagttttaaattactattcggattatgagctactcgaacgtcattttctgctaaaaatgcacgctcatcttcatttaatactacaccgtgtgcaataactgttgggcgtttaaacaatccgcagctcgctgcatattctactggacgttttccatattgtgcttcaatatcacgtacttcacgctctgtttcagaaagatggatatgaaccatcgtttgattctctactgcaatccgtgcgcactcttctaacaattctgtactacatgtatatggactatgtggtgcaaccatcgtagttaacatgccactttcgttatagtaacgcttcacatatttctcagcttcttcaatcgctttcttttcatcgtctttcgttccgaagctaaataaagtccttgaaacagcagctcgcatcccgctccttgataccgtttccataattgcgtcttgatctactccaattggattaaacatgtcagagaatgatgttgtaccacttttcaccatctcaagtaatcctaattccgtactagcgaccgcaatttggggagtaaattgactttccagtggccaaattctcgtctcaagccacggctgtaataacatatcatcgccaatacctcttaggagactcattacaacgtgtgtatgtgtatttacaagccctggtaaaacccactttcctttcatatcaattacttcatctacttcaaaatcattagcgaattctccgctctttacatctataatttgatcattttctacaatgatatatccattttctatcacttcgttttgttcattcatcgttacaattgtagcgtttacataagttgttttcaaaagtatttcccctttcaactctatgaagttccctttaataagttaccaccattatagtaacttattaaagattaagagtcaaaagataatttgaattctttcgttactttttccttcaaaatgctatattgtttttcatttgtatctgcaaatgcttctttccgatttgattccacatccatataattcaatttcccattgaattgagtctctgtaaaatcaaatctctgcccatctataaagttataaaagtgccatacctctcttacttttgtctttttaatttctcctccatatatgtcttgaacgactagagccgttacaccacactgtccctttgctgggttttcaattgtccactttgaactcgtttcaatcgaccacgattttattagtgcttcatatattcttttttcctttacatcatccattctaatcttcccctactattaatagttttacacatcatatttcaaaagaggcagtacacgacccttaaagacagttgatggtgtctctcctattaactgtgcccccattttcaagtaatatccttttgcattcggatcactatcaatcgtaaaactttttaatcctagttcattggctttttctattacgtactcccaaagtattttcccgtaaccttttcctttgtaatcaggatgaatgtacaagaaatcgagagctttatcattacgtaaaaatgagaaaaaaccaatcttcgcattatcgttttctaaaacatatacaaaattattttttatgtattcttctgtaattgttaaatcttccttacaagcaagtatgaattcttcactataatcccacgttgcttttgattgtagtgcgaattcacttaattcatttgcttcacttaataacgcttctcttatcttcatgattctttctcctcaccttcgatatgtaaactactaaattgattcggaaagcacttcaaaaaacctttttttcataaattagaggttatttttataaatctttattataaccagtacaatttttttaaagaaaaagaacaccatccctaaaagttggtgttctctttttctaaaatttaatcttcaaactcactcattcgttttactatttcgtacgatacaaacctatacagtttctactaccgcttcaaccattgttccatttttagcataattcgtatgccaagaaaaagctttttctaaaatatgaggagtttgtccacctcttgtttttgcttcttcgtaataagcacgtagttgatcacgatacattggatgtgcgcaattctcaataataagttccactctttctcttggcgcaagtccccttaagtcggcatacccctgttcagtaacaataacatctacatcatgttcagtatggtctacatgagaaacgaaaggaacaatacttgaaatgttaccacctttcgcaatcgatttagtaacaaagatagctaggcgtgcatttcttgcaaaatcaccagacccaccaattccattcatcatttttgtacctaaaacgtgagtagagttaacatttccgtatatatctaattctaatgcagtattaattgagattaatccaaggcgacgaatgatttcaggatgattggaaatctcttgcggacgcatcattaatttgtcacgatatttttcaaagttagaaaatacttgttgcattttctcttcagaaagcgtgatagaacaacaagaagcaaaattgacttttccagcatccataagatcaaaaactgcatcttgtaaaacttcagaatacacttctaaatcttcaaattctgaatctaacattccatgcaatactgcgttagcaactgaaccaattcctgattgtaacggcgctaaacgatttgttaatcgccctattttaacttcttctcgaaggaattctattaaatgctgtgccataatgaccgtttcttcatccggaggaacaattgtcgatggcgaatccaattgattcgtaaacacaattccctttactttttcaggatcaattggaataccgattgttccaattcggtcatctgttttcacaagcggaattggaagcctctccccttgtttacctggttcatatagatcatgtagtccctctaattgcgtggattgagccatattcatttcaataataatagacttagcatttaaggaaaacgctaaggaatttccaattgaagtggttggaataatcattccgtcctctgtaatcgcaaccgcttccaaaatagcgaaatctatatccagaacgtcagcgcggagtaactctgctgtatgagataagtgttgatccacaaataaaaagtctccgttattaattccttttcgcatcgtcgcgtcagcttggaaaggtaatcttttccctaaaattcctgcctcagcaaataatttgtctacatccgagcctaaagaagccccagtataaacatttactttaaaagattcatcattcttaactcggtttacaagcgcaaatgggactgcttttacatcacctgcacgtgtaaacccacttaagcctaaagtcattccactttgaatccaggaagctgcttcttcaggtgtaactacccgatcttttagacgttgatctctgattctatctaaattattctccatatgtaatccctctctcattgaatattcataattattttacacatttacactatcaaaatagggattttagtatacaatgccgaaaattcagacagaacagcaaatttaggttctaaagcagaaaaatttagaatcctagaagcttacggaaataactagcgtatgattgactaactggtactctctcaccattatccatcgaaagtacaaaagtagaatgggtatcaggataaatcgctttaatatgattaacatttacaataaatgaacggtgacatctaataaatgaatctttaggaagcaagtattcgaattcttgcagagagtatttatgtgttcctgataactcttctgaattcacgtacgtctttttatctttagcctctaaatacataacctttgaaaaaggaaccggaatccagccatctgttgtttttaaagtaacgactgactttccatccgttaaagctggataaattgccgttacgcacccttcaagctttccattgtttgaaaatggtacagccattccatgataaggaataccaaaaacatcccgattcataaactcagatgttttttgattcatcaccatcgctttatgagcaatcgttccttcctttatagaatccccagcgctaatctttaaatcaattcgtttacttggccgatagtaaatatattctttcgtattcgaaacagcaattgaaatttcatctgaaaataattcaccaacaacatctagtaataaacctaatgttctatcttccattctattaacacctcattcactattatactactattatgaacgagcatctgttgctttataaaaagtttgattttaaattatttttaaaattagttttattcactattacttcgttactacaaaaagcctcacttcagaaaagtgaggtttcctctcatacaatatttctttattttttaacgactatagaataagatttattttttattaagtaaagtgaatttaagaatttattgcccgtatttctgtaaaataaataatcccaaactacaaacagtttgggattatctttctcatttattatgcgcatctaaccaagaaattaaatctttaaatacttcatccttatttacttcatgaaacatttcatgtctaccattttcatataaacgtagtgtcacgtctttcacaccacattttttatagttttcatatacttcttttacacctttccccatatcgccaacaggatcacgatcaccagaaaatatatgtattggaagattctttggcgtcttcttgtattcttctagtttatttacttctaatacaccagaaaataattctcggtaaaaactcgtcgtacaaatgaaaccacataacggatccgcaatatatttatcaacttgattattatctgaagataaccaatcaaattttgtacgatttggcttaaagttcgaattgaagtttccgaaagataaaaagtttagcattggacttttcgtttttgcaccacgcaatttcatttcgattgttgctactttatgaccaatagctcctaaaagccctggatttccacctgttcctgaaatcagaaatccatcatataattcgcctctaagttgcacagcacgtcttgataaaaaagaacccatactatggccaagtaaaaataacgggcatgtctgctcttttcttaccgtttctgatacaaaaataacatcagacacagcctcattccaacctacatttggtttaaaatgaccataatcttcttctcttttcactgttttcccatgacctttatgatcatgtgcataaacaccataccctgcttctaataacgcagcaataaagtctgtataaacacctgcatgttctgtcataccatgtgcaatttgaataatccctttcggtttaccttctggcaaccacttgcgtaaataaatttctgatccatccaatgccgtaacgaaactttcctgtacgttcatttcgtcagctcccaactctattatgtatctttaaaaatgaatatcgattcatttttcttactatgtattatatgcaattgccttcattatgacaaatgactaccttttccaattagctcaataactattatgttgacgaatcgaaaataaaattatatagttacttacataaagtaactgtataatttttaggaggtttctactattatgatgccatcattatttttagcacatggttcgcctatgctcgctattcaagatacagactatacacgatttttaaaaacacttggagaaacatataaaccgaaagcaattgtcattttcactgctcactgggaaagtgaagtattaacgatttcctcatcagataacgagtatgaaacaatttatgattttggaggttttccccctgagttatacgaaatcaaatatcgtgcgaaaggctcttctagcattgcatctatgttagaaacaaaatttaagaacaaaggtatttcagtccatcataatatgacgagaggtttagatcatggttcatggacactcctgcaccgcatgtatccagaagcaaatattcctgtcgtgcaaatatcagtcaatccattcctttctgcaaaagaacaatttgaaattggagaagcacttaaaggactcggacaagaagatattttagtaatcgggagtggtgttaccgtccataacttacgagctttgaaatggaatcaaactacacctgaaaaatgggcaattgaatttgatgattggattattaaacatatgcagcataacgataaagatgcattgtttaattgggagaaaaatgctcctcatgcacaattagcagtaccaagagcagaacattttgttcctttatttatcgctatgggaagtggtgaaaatagcggtgaagtcattcaccgtagttatgagcttggtacattaagctatctatgtcttaaattttaaagaaaaggatgaagcaatcattgcttcaccctttttttattcactaagttaactaacttccaaatgttgtttctctgatacctcttcgttcttattatgaaaataaacccagatacacgcaataaatagtagtgatgatgtagagaggaaaacatattggaagcctgcatgtgctgcaatttgccccccgagcactggaccaatcatatttcctaaaaactgaaatgattgattatatccaaatatccgtcccgtaacatgggttggtgtatgttgttttagtagagtttgtacggaaggtaataatcctgcttgtgcgatacctaataaaaatcgaagaattaataggtgccaagctgaggttacaaatgcttgcgggataaaaataattcctgcagcaaataacgctacaactaacgttttttgaggaccgatatgatctgataatcttcctagtcttggtgctgccaaaataacggctaatcctgttgctgacataactgctcccgcaattgtttcaatatgtgcagtatgaggacctactaaatttttcacgtacaatgtaacaattggttgaactgacatattagcaagttgaataataaatgttgttacaaataaactaataattaaatgcttcgctgggaccatcgtccatacttttttcggctgtgttttttttgcttgagcagagtgattttcttcatgcaagaagaaaaaaacgatgagaaaggaaaggaataaaaaagctcctgtaacaagaaagacatgacgcattccaattaactcagacaaatatccaccaagtaatggaccaagtaaagaaccgctcacgccaccagttgaaattgtagaaattgcccaacctgaatgttctttcggagtttctgctgcaataaatgtcattgcggttgaaaggaaaccagatactgctcccattaaaaatcttagtgcgactaattgatatacatccgttacaaaccccataagcgtcataataatcgccataccgaggctagcacgaataagcatcagtttccgtccatgtatatcaccaagctttccccatattggcgatacgatcgcacccattaaaaatgttacaccaaatgcaagtcccgaccactgtgcaatacttgaagtgccagttactcctaattcctcaatataaaaagataagaaaggaattactaaactcataccggctgcagtggtaaaacaacctagccaacaaatcattaaatttcgtttccagctggccattttcacaccttctttctttagatacccattctacaccctttcttgtaaaaagtttagtaatttgctttttatgcaagatttactacaaaacccgctattttctagtaaaaaccactacatctctacatcattttcataataaaaccaactcctctatatgaagttggttacttattatctatcggtattaaacgagcattacaatttctctcgtaaaactcaatgggacctgcttgtccaataatcgcatattcatatccatcttgcttcatattatataaacaatgatacaataattcttttcctacacctttcacacgattttgtttcgctatgcccattggaccaaacaatcctttctttcctctcactacatcgtaacaggcgaaaccaactattacttcctcctgctgtgcaatatagataggtaacttttcattatatgtccgatatccgtaatcaaccgactgtaaccaccgttcaccaaattcagccgccacaaatcgtgataacttatcaaaatcagaaggactagctcttcttacatgacaaaataatgtattataaatagatttaaaactatttaaatcaaccgctaagtctctcggtgcagctgtaatacgtaatatatctttttgcatttgtgtatgtataaattcaccaatatctgtatctacacgaaataatgcatacataacatgtccttcattgattactacttgctgaaagcgttccatacgtttcttcgctatttgtaaaatttctatcgccttataagatagtttatattgtcctatttttttatactcttgatgatgtaaatcgaatcgttttcgtaacgaaagtttttctaaaaaatctggaccgactttatgaaacaaatacataaataactcagcgcaaactcctgtaccttctttacacatacctatgaacagatggactggttgaattatgttatactcactctcttctgctgcaatctccaatattttatgcacacgttttgtaaattgaaattcctccatatgtgtttccaccctctactaatttactaacaaaccgtaaccataaataattgaaacaattacacctactaccaatatacctggaagtaaatttgccaccttgattttaataatactaagcaagttcaatccaatagcagatatcataatgccgcccgtagccgtcatctccactataaattggttcattaattcttccgggacaaaactattaatttgtgttgcaaaaactgcaataccaccttcatataaaacaactggaatcgccgaaaatactacgccaattcctagagttgtcgttaatataatagaaataaatccatcgataattgccttggtaaataaaatattatgatttccgcgaatcccactgtcaagtgcaccaagtatccccatcgcaccaattgcaaaaattaaagtagctgttacaaaaccttctgatatgcttcctttccccttcgatccaactttattttctagccaatcccctaaattttttaacttttcttctaattgtaaccactctccaattaccgtaccaatcactaaactcagtatgacaacaagaaagttttcactttttaatgccatttgaagcccaagcacagtaaccgctaaaccgattgcgtgcattatcgtccctttcatactttctggaatcctactaaataatttaccaagtaaagtaccaaatataatacaaattccatttacaactgctcctaatataaccatttctcattcttcacccttcgaattctttatttctatattttggtttatacattgatttacaggttatctatatgttaacttaatattgagaatattaacaaatgttttccactacataacccgctgtttttttgtaactttaattacctttaatagattcagtgttaatttaattgcgggataatattaaaagggaaggtatatatgaaaactttactaaaacgatttttgttaatagcctttttcattacaccgattgttttattaatcaattactcttttatttcaaaagcaaaagacaaacccgatttacaaaacaaatctagtaaaaccgcttcaaaaagcgaaaagaaaatagaagaccaagaaatcacactcaccttctctggtgatacaatgtttgattggcaattacgtcctataatcgaaaagaatggggctgattacccattccaacatgtaaaagaagaaataaaaaaagctgatatttcttttgtgaatttagaatcggcatttacaacgaaagaaaagaaagcacctgggcaactcttttggattaaaagtgatccatctacactacaagctattaaaaacactggatatgacatcgtaaatattgggaataaccacacacttgattatgggcaagatggattattagatacgatttctcacgtagaaaaattaaagttcccttacattggagccggaaaaaatgcgaaagatacatatacagcacgagaaatgaccgtaaaagggaaaaagtttaaatttctttccttcgttcgatttatgcctgattctaattgggtagctggtgagaataaacctggcgttgcgaatggctatgatttaaatcttgtaacaaaaacaattaaagaacaaaaacaagatgcagactatttaatcgtctatatgcattggggcgttgaaaaatcaaaccgtccggtagaataccaaaagcaatatgtacctaaaatggttgaagcaggagctaacgcgattgtcggaagccatccacattggttacaagggtttgagtattataataaagttcctatcgcttactcattaggtaactttttattcccaagttatgtgaatggaaaaagcgccgaaactggcgtattaactttaacttttaaaggaaaggatgtccaaatgtcattcaatccttatatcattcgcaacaaccaagtttcccctgtaaatgaggaagaaaagaaaaaagctcttcaatatttacaaacaatttcaactgatgtagaaattgatgatacagggaaaataaaaaataaacgaaactagacagctcaagatctatttctctgtaatctactttacagaataggtgataaacatgctgaaaaacttattagaaaatgtaagtttgttagaaaatatttataaaatgtctatagccgttctacttttatgttcagttttttctgttagatttctaaaaaaaataaaacgcgaacgaaaacttactacctttgaatttactatgtatgtaattattcgcattgcgatatttttttggttaactagctttattcttcttgaatttaatgagtatctagtttaactataaaaaagatagaacaagcactatatttctttgcttgtatctatcttttttatttagatgcttattcttcccttctattaaataagcaaatcaaacaaaacagggtttttattaagctccataaattgaatattattttctttaaagcgagtaattaattgctcataatcttctttatgttttaactctactccgactaatgctggaccattttccttattatgtttcttaatatactcaaaacgagtaatatcatcttctggccccaatcctttatcaagaaattctcttaacgcgcctgaacgctgtgggaattcaatgatgaaataatgctttaacccttcgtaaatgagagatcgttctttcatttcttgcattctatcaatgtcattatttccaccacttagcgtacatacaactgttttaccttttatttcatccctgtataaatcaagtgctgcaatagagagtgcaccagccggttcagctacaatcgcatttttcttatacagttctaaaatcgtcgtacaaactttcccctctggtactaaaacgatgtcatcaattacatctttacaagtttcaaaagttaactttcctacctttttaaccgctgccccatcaacaaaactatctattttctctaatgcgacattatcattttgaagaaaagcctctttcatagaggcagctcccatcggttctacaccaataacctttgtagtaggactaacaccttttacatatgtaccaacacctgatgctaatccaccaccgccgattgccgtaaagatataatcaaccggtttctccatatcatgcataatttcaactgccactgtcccttgaccagcaactacatacggatcatcaaacggatgaacaaatgtcattctattttcttcacaataacactgtgcttcttggaaagagctatcgaatgtatcaccaactaatacaatctctgcgaaatcaccaccgaaaaattgtacttgtgatactttttgtttcggtgttgttgtgggcataaatattttcgacggaatcttcaataaattacatgtataagcaactccttgcgcatgattaccagcacttgcacaaacaacaccgttttgtaacttttctttcggtaaactttgaatcaaattgtatgcaccacgaattttgaaagagcgaattaattgtaaatcttctcgttttacataaacgtcacaatcatatttctcagataaaactgtatcacgttgtaacggtgttttaataacgatatctttcatgcaattatgagccattaagatatcttcaattttcactctctcctttaccttttgcaccattatatatcatccttatctcttttaaattggctcaatcaaaatgtgggattttcagaacagcccctgtattcgccgatgttaccatttgtgcataacgtccaagccagccagttttcactttcggttctggtcgtttccattcttttttacgcttatctaattcttcattactcactcttacttctagcaagcgttcttcaacatcaatacatacaatatccccttgttcaagaagtgcgattgttccaccagctgctgcttctggtgaaatatgtcctactgaaattccacgtgaagctccagagaaacgtccatccgttaataatgcaacctcagcacctaatcccattccagcaattgctgatgttggtgctaacatttctggcataccagggccacctcttggtccttcgtaacgaatgacaactacatctccttttttcactttcccaagcataatgccagcaagtgcctcatcttgtgaattaaaaataacgcaaggtccttcaaaacgctttacctctgttgcaccgcttttaataaccgctccatctttcgcaaggttgccttttaatatacgcaatcctccttcctcactatgagggttttcaagagagtgaataacttccttatctttaatctctgcctcagcaatattttctcttaatgtttgcccagtagcagttattcgatcaagatgaagtactccttctttccggctcatctctttcaaaattgcactaatcccgcccgcacgatcaatatcttccatatgccaattggaagcagggcttactttacataaatgtggtacacgtcttgaaacggcatcaatacggttcatatcgtaatctaatccagcctcttgcgcgagcgccaatgtatgcaacactgtatttgttgaaccgcccatcgccatatcaagcgcaaacgcatcatcaattgcttcttccgttacaatgtctcttggtttaatatctctttcaattaaaattttcaatttctctgctgcttgtttaattaactcttcacgtcttggatcaattgctaaaatactcccgttaccaggaagagctaaacctaacacttcacataaacaattcatagagttcgcggtaaacatacccgaacaagagccacaagatggacagccatgatcttcaatatcttttaattcttcttctgaaattttcccagattgataagctcctactccttcaaaaacggaactcagatcaacaacttctcctttagatgtttttcctgctgccattgggccgcctgaaacaaacacagtcggaatattaatacgtagtgcagccatcatcatacctggtgtaattttgtcacagtttggaatacaaatcatgccgtcaaaccagtgtgcatttacaaccgtttctactgaatctgcaattatttcacgactcggaagagaataacgcataccgatatgtcccatcgcaataccatcgtcaactccaattgtattgaattcgaatggtaccatacctgcctcacgaactgcctcttttacaagtttcccaaactcgttcaagtgtttatgccctggaataatttcaataaaagaattacaaatcgctatgaaaggtttatcaaaatcttcatctttcaaaccagttgcttttaataaactacggtgcggcgctttatcaaaaccttttttaatcatgtcacttctcatcttgtcaaatcccctcttacatatttttcatttatactctcttactctatttctttactaattctttcggtgcatgaatccaactcatcatttcacgaagctctgctcccactttttctaattgatgattttgttctgcttttttcattgcgttatacgtcggacgccctgcttgattttctaaaatccatttcttcgcaaattcaccttgctgaatttctgtcagaacacgcttcatttccttcttcgtttcatctgtaacaattctcgatcctgttacataatctccaaattctgccgtatctgaaatagaatggcgcatattcgttaatccaccttcgtacattaagtcaacaattagctttaattcatgcaaacattcaaagtatgcaatttcaggacgatatccaccttccgttaacgtttcgaacccggccttcacaagtgcagttaccccgccgcaaagtacagcttgctcaccgaataaatccgtttcggtttcttcttggaatgtcgtttcaattacacccgcacgtgtacaacctacaccttttgcatacgctaatgctacatgtagcgctgttcccgtcgcatcttgatgcactgcgactaatgccggaacaccatttccttcttgatatacacggcgaacgagatgacctggactttttggcgcaaccattgctacatctacgtaacttggcggattaatttggccgaagtgaatgttaaatccatgtgagaaaagtaacatttgtccttcacggagattctcttctacttctgatttatatacatgtgcttgctgttcatctggcaataacatttgtacaacttgtgcggttcgaaccgcttctgaaacagacattacttcaaatccatctacttttgctacttcatacgatttaccaggtctaacaccaactacaacttccacacctgaatcacgtaaattttgtgcctgcgcatgcccttgagatccataaccaattaccgcaactgttttcccttgtaataactctacatttgcatctttctcataatacgttttcatactccatacaccccttataatttatttacttgcagtacatcaattaattttttcaactgactaacaagtaatgtcgcttcattttcagtacaaactgctgtgagtttcatttcagaaacgccactcgtatctctttcgtttaaatgtaaagaagaaatataatagccacgccgagcaaaaattccacttatacgtaataagacacttggctcgttatgaataacgagtgaaaaagtatgactcattcttcccacctcttcataatcatttcgttattccctttgtttggcggaaccatcggaaatacgttttcaccttcttctacacaaaaatcaactacgacaggaccttcgtgagcaaatgcttctaacaccacttgtttcgcctctgttgaatttgtcgcccttaatcccttcactccataagcttctgccactttcacaaaatctggtgagccaatttttgactctgataaacgattttcataaaacatttcttgccattgccttaccatccctaaaaatctgttatttataataaatacttttacagggatgttattttcagcaattgtttgtagttcttgaatgttcatttgaaaagaagcatcacctgcaatacaaacgacgagttcttcttcttttgcaagctgagcaccaattgccgctgggaacccaaaccccattgttcctaatcctccagaggtaaggaacgtccgaggttttcttgctttatagaagtgagcagcccacatttgatgctgtcctacttctgttgtgacaatcgcttcaccattcgttaattcacttactaagttgatcacatgctgtggttttaactcagattctttttgcttataagaaagtggatattcttctttccatgcctttactttctgaagccattcatctgtttgtgtataaatagacatatgtaacaacatgtgtaacgcttttttcacatcaccaacaatcggatgctctacagttacatttttatgaaactcagaaggatcaatatcaatatgtacttttttcgagtgcggagaaaaaagttctaatttccctgttacacgatcatcgaagcgaacacctaatgcaagtagtaaatcacattctgttaccgccatattagcagcgtatgtcccatgcataccaagcatccctagaaacaatggatctcccggtggatatgcaccaagtcccattaaagttgaaacgactggaatacggttctcccttgcgaattcgaagagttcatcggatccacctgaatgaatgacacctcctccaatataaagaagtggacgctttgattttgaaattgctttagccacctctctaagtttcatgctgtctggtacaagttctggtttgtaccccggaatatcaacttcttcattaaagaaactggtgacttttgcattttgaacatcttttggaatatcgattaatactggtcccggtcgtccgcttttggcgatgtaaaaagcttcttgcacaattcgtgatacatgatttacatcacgaacttggtaattatgcttcgtaacaggtactgtaattccgacaacatccgcttcttgaaatccatctttaccaattaaaggcgttgcaacttggccggtaatgacaactaaaggaatcgaatccatataagcgtctgctaagcccgtaactaaatttgtcgcccctgggccagaggtagcaaagactaccccgaccttcccagaagctctcgcatatccttcagccgcatgaatggcagcttgttcatgacgagttaaaacatgtttcaaaccactttcgtataacgcatcgtatactggtaaaatcgctccgcctggatagccgaaaacggtcgttacacccaatttcttcaaaccttgaatcacgtgcccagcgcctgtcatttcttcacactgtaacttctcatacgctgtatactgctgcttcatttcaattaactcctctccttatttatgctaagctttccgtcagcccgggaacacgtactcctctttctctcgttaattttttaaattcttcggtcaattgtttcgttacacttcctggtttcccatctccaatttctctcgaatcaacttttacaactggaattaactccgctgctgttcctgttaaaaatacttcatccgctacatatacgtcatggcgagtgaatggtctttcctcacacggaatactcagtcgttcacatagctcgataacactatttctcgtaataccttctaatgcccctaaataggatggcggggttaatacttttccatctttcacaacgaaaacattatcgccagaaccttcacaaacatatccttgttgatttaacataagagcctctaacactcctgcttgtgccgcctcaatttttacaagtacgttatttaaataattcattgacttaatacgtggatctaacgcgtctggcgtattacgtcttgatgcaacagatacaacgcttagcccattatcataaaattcttgtggaaataactttaattgttctgcaatgataattacgctcggcttcacacaacttctcggatcgagtcctaagtcaccttttcctcttgagacaattaagcgaatataagcatcagcgtattcatttttttggagtgtatgtaaaactgcttcttccatttcttctaccgtcattggaattgttagtaaaatagatttcgctgattcatacaatcgtttcacatgttcttttaaacaaaatacatttcctccgtaactacgaatcccttcaaatacaccgtctccgtataaaaaaccgtgatcatacactgaaacaactgccttttctttttctacaaattccccattcatgtaaatgtactggtttcccatctcacatcgctcctcttttttctctatttttgcaatctatttctacatcgattgctgagatgagtaattttaacagaatattcagtatataaaccttaaaaatatactcgtctcaacaatcgattacttacatacttgtagcaatccattgctgagacgagggaatcgtggtaccactcagcttccttatacttctcacgaaatataagctctgcaagtccaattagacttttgtttttctatcgggaacaaccccgctactttttactagttttcaaaagtagtgctccaaggtgattttcaatgagtgaattgttaccaccctcacagcctcggggcagctctctgaaacaatctttatcatttactctcctcttctacgcattctcttcttctatttttaaaaataaaaactctcgcctcagcaatcaactactacaatttagtagctttgattgctgaggcgagagtttcgcgttaccactcagcttccttatacttctcacgaaatataagctttgtaggtccaatcagacctccgtccttttaccggagacgatgccgccgccctctactcagtttccctttcgcaagcgatgctccgaggtgatcttcaatgattcgattgttactaccctcacagccttggagtagctctctgaaacgatcataatcatctactttcctcttctttgcatatacaacatataaagttagaaaattcttaattaacttttatttgttacacgtattataggacgttgttcttttcgttgtcaacatgttttctcaaaaaaatcaaaattcattctatttattttttctcaaatcaaaattggaatgcattacttacatacactcatatattacttaagtatgtttgcattactacataaagaaaaacttataaagtttatgaggagatgaggaaactatgttaaaagggaaagtagcgttagttacaggagcaagccgaggaattggacgagcgatcgctaaacgtttagcaaatgacggtgcattggttgctgttcattacggtaatcgaaaagatgacgctgaagaaactgttcatgaaattcgatcagatggtggccaagctttttctatcggcgcaaatttagaatccttacacggtgtagaaaacctttataacgctttagatactgaattacaaaagcgcactggtgaaacacaatttgatattttaataaacaatgctggcattggtcctggtgcttttattgaagaaacgactgaacaattttttgatagaatgttttcagtaaatgcaaaagcaccattctttatcattcaacaagcactgccacgtttacgtgacaatagccgaattattaatatttcatccgctgccacccgcatttctttacctgattttgttgcatatagtatgacgaaaggcgctattaatacaatgacttttacgctagcaaaacagcttggagcacgaggaataacggtgaatgcaatacttccaggatttattaaaacagatatgaatgcagaactcttgagcgacccgatgatgaagcagtacgctactactatttccgctttcaatcgcttaggtgaagtagaagacattgccgatactgctgcattccttgcttctccagacagccgctgggtaactggacaattaattgatgtgagcggaggatcttgtttataaaaaacatatattttcaaatcttttttattgcgcaataaaacaatttatataatactatataaaacatatacatttaggaggattacagcaatgtccgaaaaaacatacgaactcgcaaccttcgcaggcggttgcttttggtgcatggtaaaaccatttgatgaacttcctggtattcataaagtactttctggctatgcaggaggtcatgtagaaaacccaacatatgaacaagtaaaagctggaatatctggacatttagaagttgttcaaattacattcgatccttctatttttccttatcagaaattactagacttatattggccacaaatcgatccaactgatgatggcggacaattttttgaccgtggtccatcttatcgtaccgctattttttatcataacgaaacacaaaaagggcttgctgaaaaatcaaaacaagctcttacagaaagcggtatgtttaaagatccaatcgtgactgaaattcgccctgctgcacctttttacgcagcagaggaataccaccaacatttctataaaaagaatccagagaaatatgctactgagcaaaaggaatctggtcgtgaagactttattaaagaaaattggcaaaaaaaataataaaaacgcatcgtgcttttttaatacgatgcgtttttatttttgataaaagtaccatacaatgatgagaacaaccgctgttaatgcccaaagcgctacttcatttttcactctactctttttcttagtcatttcatctcctcctaatagcaatacaacgtattcaagatttcctctgtttcattgtccaccttatatacataaatacatccttaccaatccttataacaagaccaccaataattccgattgcaattgaaattactaacatctgtccaaagctaaaagaatttgtgtacgttatgtagagaacgatacatataagtaaaacatccggtaaagaaagcaaaaactttttaagcatttctttatctcctctatactttatttatatcttctactgtaattttgaaatatagtttgttcaaaaattccatttagaccctcattttatgaaaaataataagaatcccttttcaaaagagattcttattcagtagatttaagtttaattattttctacatatcctattccataattactcctaaaatagaataatattactaatcatttattgtaaattgactatttgccaggcaaccgaatgtcgcgccagctacctacatcgcattggccaaattcattattacctaccgcgactaccgtgccgtctgattttagtccgactgtatgtgcacaaccagccgctatcgctacaatatcgcgccaatcgcttacgttacattgaccatactcattccagcccactgccaccacggtaccgtctgattttagtccaattgtatgattcgtaccaactgctattgctacaatatttatccagccacttacatcacactggttatgtttatcattccccactgcgactgcttcaatatctcgccagccacttgcattacattccccttctttattccggcccactgctactaccgtgccatccgatttaaggccaacagtatgacaacgccccgccgctatcatatctttgggccatcgcttcactttttctttcgataaaaggtaatccatgttttacctccttgcatataagcaactgtatcataatagatatttttatcaaatttcattataaatctacatttacaaagaaagcttattttacttcttcaaaaaataaaaacctccagtttaaatactagaggttttctcgttatttcttcaagcggtcaataaaatcgttcaatttatctagcgatttcatattctgattgcaagctacaccatctttgcaaatgtagtttccctttttaacgaaagttcctggtacatcgcctttaatttcaactaaaaacattcctacttcttcatgcccatgacataatgaacaaatgctttttttatttaaactttggaacgttccttgcagaccaacaaatttatttttatcatttttcgctataataaatttcctgcttgatcccttatcaatccagcttaaataagatatttctttcatatccatttcttccatatcaggaagttttaacttttttgccttaggaaataacttttttaatgtttgtgctgtaacttcttgaaacggaattacatacggatttattttcattaaaaatgactctgcatcttctctattttgaactgttaataccgtatcaattaactctttctgttcatccgttaaattctcaaatacatgtattatcttttcaatcgcaagcgattttaacgcttgaattacacctctatcatttgccgttgcatgcccgtttgctaaaatataagcttgtgattttataaaattatattgatcacttctaataaacgcttccatctttatcactccatacaaattgttgatctagttttattgtatacaatgattacgttttttgatatgtaaaagataacttagaaacaaacattacatatatcacttattctctaccgctgcatttcctgacaaaagaagccatcatccgttttccattccgcatataatacgtcttcaaatttagtaattcctttttgctttatttgtttataaagccacccttcatcaaatcccgcttccctcaaattatccttaactacttttccatcactaattaatgaaattggtaagtatacaggcttatgttttaaacttaaatcatttacagtaggagattcgtatttactttttttcaaaacgcttatgtttccgttaggttccaatatcatatattcaacttctcggattgaaaatatatctttttgttgcctaagcatttgttgtaattggtttatatccaaatgatttacgcttaattgttcacgatcaatctttccattacgaataataattgaaggatatccttcaaaaaaccttcttgtccctcttactttttgtgttatcacttcaatagtataaattaaaattacccaaacaaatactgaatataaaatagaccatactttaattttaggatcatatattgaatttccaacgagctcacctaggacgattgcagaaataaaatcaaagggcgttagctgagatatttgtgttttccctaatatttttgtagcaattaatagaacaaaaaaaccaattaaaagctctatcgttatttgtccaatatgattcatatatgttcacctttctactcttcaaatgttctgtatagcatttaataaaaaaacggcacattttttctattatcatgcccgttcacacttcatatatccaatacatataaaacaaaaagagtctgattcaaagtaatatatgaatcagactcttttcctcttatttagaatacacaatctttttaatcgtttccccagaaagaaaatattcttctgcaagttgatgaatagcaatcccacttttaaacgcttctttaattgctttatttctttcatctaattgttttcttccgccagatcgtgtaccccatttataatgtttcgtttcttgtttcggaatgtaaattgtttcaccttgtatatacttttgaatttcagtaattaaactctccggtaaaacagcattagcttttacgtatttcatttctgctcgccccttattttttatggttcatttcaataaggtgcaaagccaaatataaaaaatgatacgagctcatataggcgattgtatattacttgtctacctcacgcaaagtatcgccatttccatacttggctttgcatgagacgttgcagtgtctggcaattgaattataatcgccatataaacacctcctaatataccttttgcattttattatatgataaattccttctccttgcatccacacccttcttaaagcacgaaattttatctaagaagggctatcagttcgtaacagtaaatgaattgcaaaaaagagcaaaataaaaaggtagcgtatctttgtatgatacgctacctttctttttatataatgccaagtacatttaagaatacgataataatcgcaattggtgcgatataacgaagtaagaataaccataatacgaatagtttataacctttatttttacttacacctagctctttcattaatacatctttcttcatttttaaaggaacaaagatagaaactaataatacaccaagtggcattaatacgttacttactgcatagtccgctaaatcaaagactgtcttcccgaaaatcttcagatcacttaatataccgaatgataatgctgatggtaccccaacaacgaagattaataaccctacgattaaggccattttttcacgtttccctttaccttttgatgttaacgatgcgacactaatttctaacatcgaaattgctgatgtaatcgtagcgaagaagaataataataagaaaacgatgaagaataattttccgaatgccattttactgaaaatagctggcaatacgataaataatagtcccggtccttgagatggttccattccaaatgcgaacacaactgggaaaattgcaagtcctgcaagtaatgtaataacaagagttaaggctacgatagaaaatgctgaacgtggtaagctttcttctttcggtaagtatgagctatacgttaccataacggctaccccaacagataatgagaagaacgattgccccattgcgtataaaataacttctgatgttacatgtgagaaatcaggttgtaagaagaaacgaactccttctccagcaccatctaacgtaagtgcacgaacgattgatacaaagaataaaacgaatagtgctggcatgaaatatttatttactttttcaacaccattttgtacacctttacttacgataaaaatagtaataaggatgaataatagctgtgatccaactgctaaatatggattggaaatgatttcaccaaacgtagcttcgtatgctccatttccttcccatagtctacctgtaatcgcattccataaatataataaaatccagcctcctacaacactgtagaaagaaagtaatatgaaacatgttacaattcctaatttacctaaccaaggccataacgttttaggagcaatctctctatatgcatcaacagcctctttttgtgtacttcttccaataacaaattcagctaataatagcggtaaaccaattaataatgtgaaaccgatgaaaattaggaagaacgctccgcctcctccaatgccggccatatatgggaatttccaaatcgccccaagaccaattgccgaacctgctgcagctaatacgaaacctaatttcgatgtccattgctgtgaattcatttgttaatctcctctctatctctttttctttgttacaattcggtatttatattgttctatcaatacttttttctaatacgttcacttcctccctaataataaaaaaacgcccctacgtaaatacgtagggacgacaaaaatatcgcggtaccaccctagttgtgaagaacactaagaaaccacctaaataaaaacgcccctacgcaaaaacgtagggacgataaaatatcgcggtaccaccctagttatgaagccacaccaaagttaggacctaaataaaaaacgtccctacgtaaatacgtagggacgataaatatcgcggtaccaccctagttgtgaaaaaatcttcaccactttatttgataacggtataaactaccgtctttcatttcctcaaaatatgagatttatgaaagatgctccaggacgaacttcatgaataatctatatactgattcacaccaaccatcagctctctgaaatagggagatattcactactataccctttcattgcccaaatattattttccgaattgattactatcatttttatcacacattaaaaatagtgtcaacttatatttcgaatttttatgtattacaatctatttaaaaattcgaaatataagttttagtttagaaaacaagtagcttagtacataacgaattctaacaggcaatagaaaaagaattacgtattattgatacttattcaataatacaaatcatctagaaacataacctgtctctctgtattcattttttaagagtttgatggataccaagaaaatttcgcatcactatccagtggtctatttttcgtttcttctttaattacacgaaaccattcatttagaatttgagttttgggcaattgagcagcaaggctatcttcccaaattacatgtgagaaccaggctttcgtttcccattcaaactgcaattgtgcgaacgaaattatagggtgatcagctccacgaaattgctcatttactgcatttgaaacttctggagcttgcggtaacaactcgttctgaattctatttcttatcgtctcattttctagctgatcccagaaatacaattgcccatttatttgataaaaaatatcaaatgaagcctcacctttcttcaaattcaataacacgaaggcacgttccacatcattgtcagccgcttttacagcattaacaattatattttgtgccattgatacccagtaactagtcgcttcctctaccggtgattcaacatacaattcttcacttaattcatgaagagtagcttcttgctcatttactttttcaacttttttaaaaaacctattaaaaaaacccataacttcccccttattactattttctatttcacaaaataaaaaatagatttttcttgctcatccacatttactcctggcgcgtatgtatgaacttgttgcaacacttcttctattagcaactctaactcctgcacacttttttctggattccctattaatgtgtccgccatacgttcatataatttttcaggtttaatagtcattcgttccacattattaggcatccatttaaacgctggatgatgtacgtacattttattcaaaccaaataaaacaccgaatacgttcctttgtacttcgcaaataacgtcataaagcataagccaatctttccgttttaaaagcgcctttcgattgtgccaacgattacttaaccatagattttctgaaatcatcagttttgctagttcatctggatatgccgctactttttcttttaattcattcgctttcccttctccatacaaactaacaccatcatgaatggatgatacaatacattgtttttcataatttatatcatattgatccaccacatccgaaattactttctctactgtctctgttaaaaagttactaatctctaatttaattccctctttcgttaaatacgtttccgaccattcttcttcctcatacggatgatacgataatattttcccatcaatatgataaataggggccctacgatcctcatcttccggcggtgttgaccataaaatatgtaattctatatctgaatgttcatcttcaagctttctagctactgaacccgctaaaataatagcttctactttcggattttgcctataaatctctgacatctctatcgctctctcttttaatcccatttcatttccccctaaaattgcagtaatcccctatatttcatttatctatttcgatattacagcttgcattaccttttcaaattcctacttaatcatatttctatccaatagcgctgaataacttcaccagtacgagaagaaactacttcattttctaacacacctccaaccttttgaatcgttttagcagaaccgatattggatttatcgcaagttattaatactttctgcaatcctaatttttgcgcttcagctaatgcaagttgtagttgtttcgtagcgtaaccgtggcgacgtttattcggatggacactatatccaatatgaccgctttcccgtaataattctggatttaatctatgtctaatattcaaaaaacctataagttcccctttttcaaaacttaaaaactgactagatggcactcgattagctagtaaattttctcctagttcttgtttactcactttttcaaaccattcatcaagagaatcaaagttttgtaaagaactacttccatgtggttgttcccctgagtgtaaaaacgcttgtctatacgccgtaatacgctcactatattcatggattggttttaatagtttcattgttcttctccccctcttcattccataaaacaaacaccttaatagcagctattcactattaaggtgtttctatcctttttattcaaataaccccatgctcaaataacgttcacctgtatcaggcgcaatacataaaacttttttaccaacgcctagacgtttcgctatcatgattgcagcgtaaacagatgctccagaagatggcccaactaataatccttcttgtctagctaagtttctcattgtcgttaaagcctcttcgtctgcaatttgaataatttcgttatacacttctgtatttaagtttttcggaataaatcctgggcttgttcctactagtttatgaggacctggtacaccaccggataaaacgggagatcctttcggttccactactgcaatatataagtttggcaatttctcttttaacgtttcaccagcccctgtaatcgttccgcctgttcctgccgttgcaacaaaagcatcaagctctccctccatttgttcgtaaatttcaagtgcagtcgtataacggtgaatattcggattagctggattttcaaattgttgcgggataaaactattcggtatttgtttttgcagttctaacgccttcgcaattgctcctggcattctttgttctgctggtgttaaaactacttctgccccgtatgctttcaataaattaatacgctcttttgacatattgtctggcataattaaaatcgctttataccctttagctgctgcgttcatcgctaaaccaattcctgtattcccgcttgtcggttcaataattgtatcccctggtttaatgagaccattttcttctgcaacgtgaagtaaattataagcagcacggtctttcacactacgtgatggattaaacatttctagtttcacatacacgtccgctgcgtcttccggaataaatttagataatcggacgacaggtgtatctcctattaattctgttacgttttcacataatttcatagtgcatcccctattctatcgttttcttatcacttggtaataaccatgaagtaagtccaattaacggtaaacaactacataatatcataatgaactgaaggctatatatatcagctaactttcctagtactacagcacctagagcaccaaggccgaacgcaagacctacaattagacctgataccatccctacttttcccggaacaagctcttgcgcgtatacaacaattacactaaaactacttgaactaataaaaccgatacataaaaataaaggtacgacccacacaagtgagacatgtggtaataacagcgcaagtggcgctgaacctaacattgaaaatacgatgatgtttttcttaccaaatcgatctgctaacggtcccccgaagaaagtgcctaacacaccagcaatcataaatgcgaatacgaaatactgggcattttttatagataaaccataatgctcaattaagtaaaattgatagaaattcccgataccggcaccgtaccaagagcgcacaaaagtaagaaaaacaagaagtataataacaaatttaatgtgtgtacttacaattgcattttccgcctcaagcgcagctctcttcttccttcttacagcgccggttgctaattcatttttgtaccaattcgatacgaaaattaataatgcaattcctactgctgcaaatgctgtaaaacctaatgaaccaatttgaccgagtggaacgaaaattagcgctgtaaaaataggagctaaagaattccccgtgtttcccccaacttgataaatcgcttgcgctaaccctcgttttgcacctgccgccatatacgcaacacgagcgccttctggatgaaagactgcggaacctaagccaataaataaaacagaaataataacaataataaagtttggtgcaaacgcgagtccaatcattccaagcatacttgaaaacataccgagtggtaataaaaatggtgacggcttcttatctgaatacataccaaacaccggttgcataatcgatgacgtcatatttaacgcaaacgcaatccaccctacttgcatataggataaattcatcgttttttccaaaataggaaacaacgccggcacaactgcttgcatcgaatcatttaaaaaatgtccgaaactaatcgcaaataatattcgatatattgtcggtgtttctactgtgtttttttgtgaaactgcctgcatatgtgaatcgctcctttctgtacaaaatatatatttattacagtaggtgtaataaattctgacttttgaaacatttctattctatactgctttcatttctttttccagaaatataacttaactcccatcattgacttgcatccttgtaactttcagcagtaaaacattatagaaaaaggcaacccaatcacaaactgggttgcctcttacattaaattgcaaaacgcttatacttctcataatcgctcgtcttacattccacttctagtttcgtaccttcattttcataactcgttgataaaacgtgcgcatgattattgaaatacgaaactacctgtccgtgatcatacggaattaacatttcacatttcgtatattctttataaatatgggaacgaatcatttctacaagctcttcaattccaacatgtttcttcgcagataaatacacgcggtcttcttgtactttcggaatttcaacatccaccatatctgatttgttataagcatagatcgttggaatattttctactccaattttctttaacgtttcatttgtaatatcaattaattgttcataatttggatttgcgtaatctacgacgtgaataagtaaatctgcttccgctacttcttctaacgttgaacggaacgccttcacaagatgatgtggtaatttacttacaaatccaactgtatctgttaataaaaatgatttattatctggcaaatcaatatttcgtacagatgtttctaacgtcgcaaataacatatctttttcaaatacttgtttttcttctgtaccattataaatttcaagcattgcattcatcgtcgttgactttcctgcattcgtataacctactaatgctacaacaggtatttcatttttcttacgttgctttcgctgcgtttgacgctgggcaacgagcgcttctaaatctttattcaaaactgaaatttgttcttcaattttacgacggtctaactctagcttcttctcaccgacacctttatttttcgtaccaacgccgccgctctgtctccctaacgattcacgaagaccaattaaacgaggcatcatgtactgaaggtgtgctacttctacttgcagctgtgcttctttcgttttcgcacgttgcgcaaaaatatctaaaattaaaatggtacgatcaatcaccttacaatctaaatcctcttctaaatttcgaatttgtgaaggagataattcatcattaaagatgaccatattcgcatctatttcttgtacatacgctgctacttcttcaatctttccttttccgatataatgcgatggatttactcgttgtaaattttgcgttacttgcccaattacctctacatcacaagcttccgcaagatttgttaactcttccatcgaatatgcaaaatcatcttcattacctacatttactccaactaaaactgctctttgtaatacttcttccatatatttattcctccatttcgattacgtaaaataaaaaacacaggtcgctgcctgtgttttcgtaaacggataagggttcaccaaagaaatagaagaaagctatgctttcatcctattttatagtcaaaaagtcccaagatcgtatacgtatacacaataagcgttcacctatacaatcccattctatttataaaggcaaaacaaaaagagggcgtattcgtccctccctctttttcacatataagcttaataaagggttcctttaaaataggcagaccaatcccgttcactctgtacacagacagagcctttgagcgctattcaattattggcacaaagtattgagacgtaatctgattaagatcaaaggaagcccctccgttcattttaagttacataaagtgtagcataagtaattcgctttcacaaggtttaacaacctatatcacactaaagaaaatcgttatttttttactttaatcgtcattttttgcgagtttttctcacaataaaaataacaaaagcaattatcaattttagaaacttctcgtatattatttttacagcactcgccaaattccttcatagtaagttaagtattatcgttttaatacaacaaaaatctatattgacatttttataacctaatattagtatcaggttataaaaataaaaattaggagatgttcctatgcattctaaatctcgtattactgcaattggtacttatgttccagatcaaatattgtctaataacgatttagaaaagatggtccatacgaatgatgaatggattgtacaaagaacaggaatgaaggaaagaagaatcgctagcgaagaagaatattcctcaaacttagccattaaagcaattaaaaatttatgtacaacatataagaaaaacttagaagatgtcgactgtatcattgtcgctactactactgctgattacgttttccctagtgttgcttgccaaatacaacaatacttcaacatacctcatacactagcttttgatttaaatgcaacttgtgctggttttacatatggactacacgtcggtaatagcttaatcacttctggatcacatgaaaaaatacttgtcgtagcgacagagacattatctaaagttactgattataccgatagaacgacctgtattttattcggtgatggtgctggagctattttattagaaagagatgaagacatcccaagctttatcgctgctcacatgggaacaaacggtgatggcggcattcatctatatagcacaaacttatctactactatgaatggcacaccactgcaaacaaatgaaaaaatcgttcaaaatggaagagaagtatataaatgggcaacacgaacagtgccaaaaggcataaaaaatttattacataacgcaaatatgcaaggggatgatatagactggttcataccccacagcgctaacttacgaatgattgaatctatttgcgaaaaatctcaaattccaatacaaaaaacattaacgagcgtggaatatatggggaatacctcttcagtcaccattccactcgctctagatttagctataaaagaaggaaagttaaataatggagacacacttttactatacggattcggtggtggtcttacacatttagggcttattgtagagtggaatttaatttaagtgtataaaaagaggctctagtcagtaactagaacctctttttcatttaatttcttgccccttttcgagaccatatcacaacaggaataagtaataacgctaacacgcctccagccaatgacaatgccgcataacttgaattcgctactaccatacctgacatcgctccaccagaagctccagctagcgcaataaaaacatctattttcccttgtgttttagcacgtgtagacggtgttgtggaatcaacgatttgtgctgtaccactaatcaatccgaggttccatcctagcccaagtaaagacagagcaacgattaatagtaataaagaatcacttggcgctatcgcagctatgacacccgctgcaagtaaaatcactccaccagctatgctcattgtagttcggccaattttatcaattaacattcctgtaacgagagatggaagatacattgcacctacatgaaaacctatcacaagtcctactgcacttaaaccgtgaccgtggtgtcccatatgaactggcgtcatcgtcataatcccaaccatcacgatttgcgtaagtatcattacgattgctccaactgtaatacctcgtttattttctttcgcttcgtctgttattggttgtcctttatatgtatgttcctgtttatatctttctattatgttagcaataattaacggatctggacgaagcataacaaaaagaactagacccgccagtataaatgctgctgccgatagtatgaacggacctgcaagtttaggaactccaattgaatgcgcaaaactacccattactcctactaaatttggtcctgcaactgcaccgaaagtcgtcattaccatcgtaatactaacagccgttgctctctgcttcttatctgctaaatctgtacctgcataacgagcttgtagattcgtggctgtaccggcaccatatatgagtaaagaaataagtaaaagaataatgctattcgttaaagctgccattacaacaccaattgctccaaatccacctactataaaccctgttgcaagacctatccggcgtccatatcgttgcgaaagcttccctactatgaaagctgctaatgctgatcccaatgtaaacatagcagttggtaatcctgcaaatgcatctgttccaagcatttgctgcgcaagaagtgctcccactgtaataccagcagctagtcctgcaccgccaaacatttgtgaaatgctgacgattattaacgttcgtttgtatagtttttgttgctcttcttctgtgtacacatgattatctattaaagcccctgccttatctagcaattccccatcctccttttaaaattaatccctcttgttaatgtactatgtataacgttacatattcaatggcattttccattcatccctttcattctaaaaaactttctaatcatactcgacttatcccatgctatattaaaaatactactattcacaatatgcaaggagaaaacaatgaaaaaacaggctaatagcagcctgtttccctttacacttcttctactatccttccccttctctttttactcaaagctcttccttcccaaaacaacaaacttacgaaagcacaaattaaaataattggcacacttgctttatataaatctgtaaaactcattgccatctgattcttggcataatgattcacatcattcgaaaatgtgagtacctctttctttatactttcctcttgtttttcaacttcttttgttacttgcctcataacttcttctctttttacatccctatattctactggaacttttcttaatatttcatccgtcttgtcgcgaatcaattcttcctttttctctttacttaatcccattgtcattgcattttgtttcttatttatattcgactctaaactttgattctctattttttctttagtcatttgtaaaatttcagtttgctcagtactattcacatgaatattccgcaccttttcttctgcataatgatatactttttctttatttatagttaaattatgagttaagttagagacaaatattgcgaccgccaatacaattccaacctgtcgtaacattgatacaacactttgagaagcagttaataattctccttcaaacgaagacgcacttaaaactgtaattggccccactactaagccatatccgacacctaatatcatacatggaataataatttctatatttgttgaatgaacatcaatcatttgcaaccaatagtaggaaagccccataacaagaaatcctgacaaaataatagttacttttccgagttttttaattaaagttgctgcaactggtgagacaaaaaatatcatcgctgaaataggtgtcactaaaaaagccgcttcaatttccgttcgaccttgtagtttcgtcaagaacgttggaagcaatacagtaactccaattaaaaataaattactcaatataacaacgattgacgctccgacaaacattcgatcttgaaataactttaaattcaccattgggttatgaatctttcgttctactaaaataaatagaataagagaaatagtgctaattgcataacaagacaaagcaatattactttgccatccccatgtattaccttttactaatatgagagtaaatgaaaaaattgctgtgctacttaatagtagtcctatccaatctatttttgagataatacgttcttcattttttatttgtagcatgatgcaacataacacgattcctattatacaaaccggaacattaacgaagaacacccatctccatcctaaattttgcgtaataattccacctattactggccccatagcagctgacaatccttgtgttactcctaaaattgcaagtgcaacatgccttttagctaacggcatagctgatacaccaattaccatacttgttggaaataaaattgctgccccaatactttgtataaaacgagaaaaaataagaaaatcacctgtattagcaaaagcgcaaagtaccgatccacccccaaaaatcaccagaccaagaatatacatctttgcttttccaaagatatcagctatccgccctaacggaatggcaagtactgcaatcgtcattgtataaacatttaatacccaagacatcttttctaatgaagtatttacactcgattgtattgccggtaaagctatattcataattgtcgtatcaatcatacaaagaaagatacctagacacattaaaaagacaatcttaataccctttgattgctccatctttatatacccctttatttattgtgaatgcgtttttcactcttctgttttattgttttctttcgcctctaactcttctaattttttcttcaaagtctccacttgtgcactatacgatgcaatacctacatctagtgaaatttcttcgacgaaagtaatacctattctccacttttcatatttcaatcgaagatctgcaatgtacgcttcttttctttcaatttcatctttaatccatttttttattgttacatcatcactatagttgccaaaatacattctcattaaaaaatccgaacgtaaaacatccttctctataggcgtctgcatgtattgataaaattcttcacgcccctcatctgtaataaagtacattttcttattcggttttccctcttgcatgacaacctctttttttattttcccttcattctccaattgccgtaatgttggataaatcattccaaaacttccatcaaaaaaatgagtaaatacgtcttcaaacacaattttaatatcgtaaccagacaattccttttccattaataaacctaaaacaacatctcttcccttcaaagtaaaacccccacatagtatataatcaataatcatattaacattgttaatatgattattgattatataccttattctgttaattgtaaaatgtttctaaataaaaaagccccataatttggtttcaccaattcacagggccattttcttatttactctttaacacctacaccttgcaaaacttcaatatcctctttcatttcataataataagaaggcaattctataccatgttctaagaaataatcctcaatgaatgaaataataatttttaacgttttcacacgagcatacaatttatcgttactttcaataatatgccactttgcatttggcttacttgttttttcaaacatgtcttccattgcttcaacatactcatcccatttttcacgattacgccaatcttcgtctgtaattttccatcttttcaaaggatttttctctctatctttaaatctctttaactgttcctctttacttatatggtagaagaacttccctattatgtaatggtcatctgttagtagtttttcaaaatcattaatctcatcatatgctctcatccactcttcctttgtagcaaatccttcaacacgctcaactaacacacgaccgtaccatgagcgatcaaaaatggtgatttgcccgtactgtggaattttgcgccagaaacgttgcaaataatggtaacgtttctcatgaggtgcaggcgctccaattggatttacttggaacccacgcgggtcaagatgttccgtcacccgcttaattgccccacctttaccagccgcatcccatccttccataacaagcataaccgcgattttttcttctttcaaaatttgctgtaatgctaataagcgcctttgatatttttctaatttcttattgtacttagattttgattcaatttttttcgttaagtctactttagcaagatgtccattttccataaaacaaatcccccttgttgtatgacaatgttattttaacatatttttggtaattttttcatatcctaaaaaaactgtgtagaaacatctctacacagcttccttctctaatttcacatatataagcacatttaactacattaaaataaataatttatactgaactcttagtatattctttttattaaaacgtaaaaatagtccttttaaaaagggcagcaatctaagtatagaaaaacaaatttattcttttttactacatacgtaattatgccggctataagagtattgaataagatattgattcactactcttatagccactttacattatatggtatatttactcgtaaaaagaagataataacaagtaaatccattaaagaatgggagctctaaaaaaatgaaacgaaaaatattaactctctttacacttttatgcttagcactaccaatacaagctagtgcttacacatttcagtcactaccgattgcgtcaaagtctaaacaatggtatgtcgaaattgataaatctcataactcaaacaagcaagcaatccagccaaagcaaggtgtatttgatacgtatagtttactcgtaaaaaacatcggtcatgatgtatcaaacgtatctgtggaaatacttgataacaaccctacctctaaagctacctttaaacctactacacctaatgaaaatatttctaaaagtcatacaagctttgactacatggtattcccattagactttaatagtcataattttaaagttgtaatcacttgggaagaaaagaatttctcttacaatggccatccggtaaatgaaggtaaaaaaatgaaacaaacatttgtatttaatgaagactaagtcctaatttctttagggcttagtcttcttttttgaaacctgcttgtatcgcttccgtcacttcttttgtgatttctaattttgttgtgccaaatatgtacggacagtttttcattacaaaggtgttttattaatactagttgattatatgctaagttattttctatataggtctagccctcttttcccatataatcaattaaatcgacgaatactctgtacagacaatgctattccaattgttaaaattactaaactagctagtgttataatagttatttcgccacctatgacagtagctaaccagcctacaactacataccctaatggcaataaagcaaaagaacccaacatatcaaggcttgccactcttccgaatgcttcttctggtacaaactcctgtaaactcgtttcccaaatgagtccaaatatcatcatgccaaatccttcaattgccattaagaatattaaagcgggtgcccaagaaatgaatggcataattaataaagcaatgccactcattaaaacacctccataagccagtaatcctctcttatgccaccgctctttcccaccaaatattactgcggcaattatagccccaccaccagaaaaggccatgccaagcccatacacgtaagcttcaaaatgatgatgaacattaaataaccatggaattaatacgacgataatgccggcataacaaatatttataaaagaaaaaactaaaattgtaatccacagccacggatgactttttaaaactaaaacaccttccataaactcttgtttgtaagtaagcttactcttttcaatgggttttacttttttaaacttaatttcttttaaaaataataaacataaaaatgataataagtacgttgctgcatctagtccgaaacctatccctgcagatgcaaccgatacgattaacccaccaagtgctggcccaatcaatcgtataccttgattactcatttgagtgagtgcgttagctgcattacgaatttcaggaacgaatactttcgcccttacagcagaatatgctggttggaatatcccttccataagtccgtatatggcaacgagaatatataaaatcgtaattgttaataaatccataaatataagcgatgcaagtaatagcattaatatacagcggattatatccgtaaataacattaatttaacccgatcaattcggtctacaactaaacctgcaaacggtaaagcaagaatattaggtagcatgtacattgccatcgtcatccccattacaactgttgagccagttaatgaatacacaacaactggaagtatgaccatagttatcgaactacctaaggccgagagtaattgtccaatccataaaaacttaaagtgcgttgatactttaactggtaataataattttccaatataacttaaacttttctccttttgtatttccccttgcatgtctctctcctcttttcaaatgactatagaatacataatatacgactgaaaattcataatattatatttccaattatataagaaaccattatgttatggtaaaattatcaaaaaaatataaaggagaatgcatcattatgcctccaaattcacataacatcgaacaccaaatctatacaatgtgtatgatccagcgcaacaatgaagttttactcgtaaaacgacccaatcatcgaggtttccctggctacatagctcctggcggcaaagtagattttcccgaaagtatcgttcaagccgctataagggaagtaaaagaagaaaccggattacttgtttcggatttaaattttaagggattagatgaatatgtaaatccgaaagggaatgttcggtacatggtatttaactactggacagactcatttgaaggtgaacttcttttaaacccacctgagggcaaattattatggataccaatcgatacagcactaaagcttcctatgcaagattggtttaaagaaagattcccattattttttgaaaaaggcacctttgaaattcaacgtgtttgggataatgagctagataaacaagttgctataacaattacacatacgtaaaaaagcttggaatctctccaagcttttcttacttctcctgtactttcttaatcttataatcaatttctaaaaacttaactccaaatatccacattctatgattagcttctagtatgtgatccgtgcgctcttttataataaaagtctctgctaacggtaaacggattgtcaagaaccgagtatgtaaataaatcccctcatctccctgaccattttctcttaacttactagtaataattaaatcatgactatcattatatagtttcaaaataccagtcatattcgaataaggtaaaggtaaggcgatattcatatatgtctcactcttatttgtatgctttgaataaagagctacaaaaatagatttacctgcttcattttttcttagccaagcccttacattctctcttccatctttctcatctatgacactaatgatagagccatgcatcgtttcccaattgccgcccattcctaaatgtatttgttctacacgcttactcattttctcatagcaaagtgcgaacggacggaaccaacgagcccatttaatattcgattgcaattcatactctactgtattttcataaaaatgaataatacttaaaggaaccttcgtcacatcaaatgcctcactatgaaagtcatttactttatcaactaaaccgttgtattccttactgtctactaaattgctgctatataaataagcctcaccaattgccacatttcctcttaacttactcattggtttcccatagtatttataattcggaacactcttttcaatcacccagccgataaatgccggtaacgctactccaattccgttgacaacaccatgaatccaaaccatttgagcaattgtaatcgtcaagacatgcttcaaattcccgtatgaatatataagtgagaacataattgtaaccatgagtgtactagacgaaacgattagaagaatctttgcactgatagcattaaattttgctctccaaacgtaaaatccatacccataaattgcacataaatataggaacactgcaaaaaattcaaatattcttgagtatgtaattcctattgcaactgtcataggtgaaatcatgatgataaacataatagcatcatacactttacttctcttttctctttttctccctattaaaccagctgataatggcaatagaaacgccgaataatgaaaatgtgcagctgtgagtaaaacaatgtcagagctaaaatgcataattgaaagttttgctactgaagcagaaaaccaaaaaccacctaaaaacaaataaataaacgcactatctatggcgatctcttctaacggcttccatcctctttctagcaatctacttacaccaaataacgcaacaattcctgtatatacaaaccaaactagcgcaaataaatagtgatttgtgacgaaagctaacattgcacaaattgctgcgattggatataaaaatgatacggatttataaaataataattgcgatccatctctttttcttttatcaataatacaaaatgacattggtataaataataaaacagataataatataattgcttcaacaggatttatattcgaccactcacttattagaaaaacaacatagcaagcaagcccaaatattatatttttcatatcgtctattccctttccacaaatgttcccttatatgaaaaaagcgaaccaattaacgggtttcgtacttgtacatgaattcgaaaacattgtagtgtttcatcataactttcaacaatttttgcctcaccatacaaaaattttggtaacggcatttttcttccaaacatataaaaccattgtttctttgaagaaatatgcattgcccctaactcatcgatatgaaaatgcagtgtagaaacgagtaaatgtggttcaccaaaataatctacaatttcattttcgttttcatcaaactgcataactgcattaaaatatcttttcttatttcacctattgattccccttctccaactatttcaagcccaaatccaatctttgttttatacaaaaacttctgtggttccccttcttttttctctaaatacgaaatttcagtaaagcgagcatcccactctgtatgtatatctggttcttgcgtatattcccataatttttccatcgtcgtgttcatttttgtcgcaacataaataggctgtttccttttcattctccccacctcctatgcactataactttaatgtacatgcaatgaatttattttgctacatttttcacaaacttcctcagaaaaaagaaagaatttttaaaatatatataaaacacttgattccacgaaaaatttaaattattataaaacaaatgttaccaacaacttcataaatcaaacactctcgcctaaaacgtgagatagaggttgcgatacttatgagtattctaatggagacacagagatgtctatgaacttagatgaaaggaagtattgccgaaattgataaatttctctgcatttatcaattggggctgttttcgaatagaaacagaactgtcatatgtacagacgtgtacgtatgaagagctatctacaaaaaagagatatcatttttttatgatattccttttttggcggtttttttattagctccgttttctgtttcccttttcctgtaacagcaccatcctcacttatttgagatggtgttttttgtttgtctttctggtaactacaggagtattggggatttatatatttcctaatctattcttaaaaatagacgaaagaaggaatttgtaatggaaacaattgttcaaaaatttggtggcacttctgtcggaagcgtcgaacgcattcaacatgtagcaaatttaattattgaagaatatgaacgaggtcatagcattgtctctgtcgtttcagcaatgggaaaaagcacagatgaacttgtcgcactcgctaacgctatcacagaaaatccaagtaaacgtgaaatggatatgcttctatctacaggagaacaagtaactatttcattattaacaatggcactgcaagcaaaaggctatcatgcaatttcattaacagggtggcaagcaggtattacgacagaatctgtacatagtagtgcacggattactgacattcatacagatcgtattcaatcttatcttgctgaaggtacgattgttatcgtagctggtttccaaggtataagtgtagaaaatgaaattacaacgcttggccgtggtggctctgatacgactgctgtcgcattagctgctgcacttaaagcaaaaaaatgtgatatttatacggatgtgacaggtgtatatacgacggacccacgagttgtaaaagatgcttacaaattagacgaaatttcttatgacgaaatgttagagcttgctaatctcggtgctggcgtattacacccgcgcgctgttgagtttgctaaaaatcataatgtagttttagaagttcgctcaagtatggaacaagaaaacggaacaattgtaaaaggagaatgtaacatggaacaacaatcaatcgttaaaggtattgcatttgaggataacattacacgtgtcacaattaaaggattagaacaaggctcgctttcaacagttttctctacattagcagcagcacacattaatgtagatatcatcattcaaagtattacaaatgaaggaactgtacacctctccttctccattcattcgaatgatttaagagaaactttagaagttttggaacaaaatcaagaaactcttcactatgaatctgtagaacatgaaaatcacttagcaaaagtatcaatcgtaggatctggcatggtatctaacccaggtgtcgctgcaaatatgttcactactttaaaagaagaagatattcatattaaaatggtaagtacatcagaaattaaagtgtctgtcgttattgaccgccttcatttagtaacaggcgttgaggcgctgcatcaatcatttatggcgaaaattgagcctttagtgcaaatgagctaatctgatatatttagtaatgctaaaaaaatcatattaatgtattaccttcctattaaataaaaagctgttcgttaacacgatgctatatgacatattaaaaaacaccttgtcacattttcctatactgtgacaaggtgtttttgactgaaaggaatttgtaactacttagtagtataattatgaggataattaaataatagacttttatacataaggagataagactatggcaaaaaacaaattactacgaatggacaatgtcagcatcgttgtagaatcccttgataacgcaatctctttctttgaggagattggcttgaatctcgaaggtcgagccaatgtcgaaggtgaatgggctggtcgcgtaactggactcggttctcagtgcgtagagatcgctatgatggtcactccagatggccacagccgaattgaactttcgcgatttctcaccccacctactatatcagataaccgaaatgctcctgtaaacgccctcggttatctacgcgtcatgttcaccgttgaagacattgacgaaatggtatcgagactcactaagcatggtgcagagctcgttggtgaagtagttcagtatgagaactcgtatcgtctctgctacattcgtggagtcgaaggaattttaatcggtttagcggaagaactcggtaataaataagtaatattttataagaagtctttactaaagtaaaaatatttgaaagaaattctcgcttcataaaacttagattttgaaccccgtcctagctttagaacggggttatgcttgtttgaactttttaacacactatcaacatcctaaaatcattataaaacaattcaattacttcttatactctttcctaggaaatataactgattcttctcacctcttatcatatatatcttttcttttaaaaaacgatctgaactcattcaaaataactttcttcacgtcagagtaaaaaactatcatgaatagtgctattcctaataagatttcttgcattccttcataatcaacgaaagcacttaaaattagcaaaccacatccaatataaaaaccaaattcatttcctttctcaaaatcctcatcttctgcatcactatgtattttctttttgaaatcttgattcccttttatcaactcatctagcgtaacattatacatttcgctcagtaaaattaaattatcaatatcaggataacttttatcattttcccatttatatatcgcttgcctcgttacaccaatctttttagcaacatcctcttgtgaaaatccctttgactctcgtagtttttttaactgttctcctaaattcataacgtcccctcctttaacaaattattacataaaaagagatataaaagaaagaaaccattagtaaaattcactgtaaaccattcgtttacacaataaaaagagaggataactctttgagctactggtattatcccctataggtagaaagtaaaaaaagagtccatctgatatgatggactcaatactgttttatctggaggggaaaatgtacatatttattcaagcgttaatgtacatatttaagttagcatttatagacggtgtagaagatacaattcaaaaaaagaaaatagcatataaagttcaagattatgatggggaaaacttgcgattatttaatgagacgtcatttaatacaattaagtatgtgaagcaaagttaaagttatgaaggactaggtttaaatggcctagtccttcattaaagtgcgagtatgtaaataatatgttatctttcgttctgtttacttagtatcatgttattctttaatagagtaataaatggagttttgcattaaatatatgaggttggttacaaatgataaagaaatttactagattagtattaatagtggttatcccaatcagtcttattacaggttctggggctgctgaaaaaactgaagcacaaaagccgaaagcggtacaaacggagaaaaaggactatatggattactcatatggtagcaaaggtatattagtaagtggcaaagcgaaagaacggcaacaatacgagattggatatatggatgataataagttaattgggattgacgaaaatattgaagactgcattattttagataataaagatgaagcaggtctcatttggaagcaaatagagcgtggatctattattgaagtgcaatacggtaaggatcgcaatgatatcgtaggcgtgcaattcgtaggagatcgtgagtcatatgaaattagtgataagtttgatcggaatacgataaatgagattgttgaaaacgttaaagggaatttgtaatagatgtatttcgatagtataggatctcttattatgaaattgtatgccagttatttgtctaagtttaaattgattattttgacggtatttgtaattagttgtaaaataatgtttgttgacgaattttataaaaagtatgttagatgaaattcatctgtagggatgacatataaatattttcttaatgagtataaaatatgataatttaaatatataaataaaaaagaaaatgtattggaagtacatagtagattcatatttttaaaaattaatgtaacaataaagggaggttgagatacatacacggtgggagtgtgtatgtatttattataataatgaataagacaatcaaacaacaagtaatcgcactatcaacaagtctagtgattttagggagcgtacctttatcagcatcagcagaagagataaacaaatctcaaactgatcaacttaatattgcccaaggagaacacggaacgagcggattaaattattctaatttcaagttggaagttcctgatcatgtacaaattaacgaagcagaagtatctgaaaatgaaaaaatgcttttagaagaatataagcataaacatgatgaaacagaagaattaaacaaaatgcaaaatgctaagaagggacaagtagcagaaaaggaagctatttcaaacattgaaaaggcatttgaatctgtagatggtcgaaatgatggatctgatcgtcaaatgaaacctgttgcaaagccaagaggtattcaatatagtgcacagagtacgaagaaatatggaacacttgcaggagttccatttgtggagtggattgttccagcaggaaatcctgatattcgtcctgcaaatccgatgaaagcacgttacattacaattcatgagaccgcaaatacagccgctggtgctaatgctgaaaatcatgcgaaatatttatacaagcaagcaactgaaggcactttccgaacagcttcatggcattttactgtagacgataaacaaatttatcaacacttaccaacaaacgaaaatggttggcatgcaggagatggagatggatcaggaaacagggagtctatcggtatcgagatcgcggttaaccaagatggtgattacaataaagctttagaaaatgcaaaacgacttgcaggttatttaatgaacaaagaaggaattggtgcagatcatatttacaagcatcaacaatggagcgggaaaaaatgtcctgacattttaatttcacgtggtaattgggctggtttcgtacaaggaattcagtggtatgcaaatataaatgcgcagattgatacgcctttacaagataaaaatgactcatttaatccaaatgaaaataatccagctgaacctagcatggaactagtggtaaatggtagtggtatcaatgtacgtagtgatgcgggtattgaacatcgtgttgtacgtaaagcttcaaacggagatcgttacaaagtattagcggttaaaaatggttggtataaagtaggtaatggagaatggattttctatgacccaagttggattaaaattaactacaatgtaccaaaggaagaagtacaaaagccaaaggaagaagtacaaaaaccaaaagatgatattacaggtggctggtttgaagggcatattcgtaaattaaacagtctaggtattatgcaaggcgaaggtaatggtgtatttgcgccatatcgaaatgtaacgagagcggagtttgcgaaattaatctcgaatgctcttaaactaccagagggaaataagtcatttgtagatattaatgaggcacatccatcacttcatgacggtattaaacgttgtgcaagtgtaggaattattaatggtcgtggtgaagggatttttgatcctaactcaccaattactcgtgaagaagtatctattatgattgacaaagcattacgatataaaggaattacaggtgagttagtagcattaccatttacagataagcatttaataacatacaaagaatcggttcaacgattatacagtctaaaggtagttaatggtattggaaataatgagtttgatccccgaggtacagcaactcgtggtcaggcagctgcctttattgtgaagatgttagattcaatgcaaaaataaaatgaaactttaatcagtgagggccactcgcattgcaatcgagcagtttattcaccgaattttgaaatgagagttgtactgtccgcaaatagcagaataaatggtatgtagaagctgacattggtagaagtaaaaaataagaagaatttgaaaggagctatccaaaataataatttggaatagctcctatttagtaggaagaacaaattgtatttcatagattgtaatgtagaatgcccttccaagccccttataagcccctaccaagtaataaatcactaagaaaaaacaaaaacaaaaacaaaaacaaaaacaaaaacaagaacaaaacaagcgcgaaaaaatgaaaccggcgttgtagtagtaaaaaaattgtaattcgaatgccaaaaccattcccgtatgcctatctttataatgaaggattaaaattttcctatttactagcaaagagtggagggaaacatatggcggtataccgtaatgtgcaggtgaacttttggcaagatgaattcatattagatttaacgccagaggagcgttatttttacatatatttgttaactggtacgaaaacaaagcaatgtggtatttacatattaccgaagcgtgtggcagagcttgaaacaggttatagtatggagactgttgagaagttgctaaacaggtttgttgagtatggaaagattttatatgatacggaaacgaaagaggtattcataataaattggttacactataaccctatttcaaatacgaatgtggagaagtgcgtattacgtgagttaaagactataaaaagtaatgagttcatacatatatttttacgtaaatgccttgaagaagaatacaagattccattattattgcagcattttggtatgccaaaagaagaggataatagtagttcacaagtagttattgaagagaaagaagaagcggaagagatagaggtggaaactatagaagaggacgttccaaatagtgaagtttataagttttatgaacaaaatattagtagtttatccccatatattgtgaaggaattgaagaattggatacaaagactttctggagagaaagtgttagaggtacttaaaattgcgtttgaaaataataagaaaacgttagcttatgtgagggggattttgaggaattggtgtagtgaaaaattaaaggattttagtggggagaagtgcgtaatgggaagtttagagagaaggaaatgtattttgagtagtgtattttaatttacattaacttaacatagaatgtatgttcgtttttgtgaggtttatgctatactaccattaaataagggtatttttataatagataaaaagatgcggggggtacaaagtttgactactagtacatctgagttgtttcaatatattaatatgacagaagaacagaaacaattatcacaacgatatttacagacaaaagaagaagagattttaaaagatattcaactaacgacaattcgtgatcaaaaaagaagcgattttgcggagcgatttataaacgattttaggaaagtgcataaacaagatccggatttttttcgattattttaccatatactcgaggagcaattattaaatgttcttgtagtccgttttgcgcatgtcagtttttctaaaatgaagatttatttagaaaaaagtgcacttcctttggacaaacttgtagcaatcgcatgtaaatatttatccagtatttcaagttatgtgaatgaagcagatgtttttcttagagagttaacaagagagaatccgaactatatagagggacaattacatactttaccaactaaccagcaagtaacattacttcttgtaatgtttgatgtagattatgaaaagtttcgtacatatagttctttattgaatgagaggttagaagaacatacagaatttatattgaaactgctaggggaaaaggaaaaggttgaagcagttaaacggtatttaaaaggtaaagatgatagtgaagtatttataggtgggaatttaccggaacatatttggcggctattattttgtgttcataaatattcgaatgttgcgaggcgatatattgaaatattggcgaagaaaaatgtttggggttttataaactatgcaacacgttatatgtgtcacactctcggtcagtctcaaaactacaaaaaaactggtagtgtaaatagagaaacatatgaagaaattcaaagtttttgtacacagttttggatttctaaggaacgattttttgcgcatcgtctaaggcaacatgatttgaatagtgaggatttttgtaagacgtatgaatatgaattgctatgctttatgttggaggaaaatcctgaatttattcaatgtactttgcaatatgtaagtagaatgaattatctcatcgtcgcacgaacgctagctgaaaaaggatatgagctaaatagagggaaaatgcgagaagaattttttgttgctgctttgcaaattaaattgtctacagtgcggaatacatatcgtgattatttactagggaagttgtcacttgaggatatggagcaaatatttaaaaatccgaaatatagaagtatgtattggggtatgccggtgttagaggttgcgcttctttgggatatagatgatatagcgaagagggaagctgtacttacactacagtttggagatgaagatagtgttaatttatacgaacttctttacgaatgttctgtcagaggagtagaaccgaaacaagtattagaagatctgctttcgtatggattaagtaaggaaaagcttatcgcttatgcagttgaagaagctgcatgctacagtgaagagcgaaataaggcgaaggaagcgcttgtttgtgtaattgtaaaagaacaagcgtacatcattgaacgatttgatgagtattctgctgtggccaaagcatatattttagaagagttagcaaaggataacatgattaaaatgcgtccaattttaattaaaagcttaggagattcatctaaaaaaatgcgtgagtctgtagttgaactgctttcaaaagaggtagaagctgcagcagatgtagcagttgaacttcataataaaaagaaaattgttcgtgaaaatgtgatgaaaatacttatagagtataagcttgaaaaatatacgaaatttgtacaggaagctttgcaagaaagtaaaaatgaatctttcgcaggaaaattctcgtttttatttcaaacggaggaagaaaagatagaagaactatgtgcacgtattttaactgaacaaacaagaaattcacttctgcaattgattggggatgagccacaaatccgtttacgtgactctgatgaaattgctgatgctgcaattccgttagcctatttacaacagtatattttagatgctgttattgagaagaaagaaacagcagaagtaattggtagagctttaaatgaagaggacttaaaagaatatgtgcaaacaatatatcaaatatggatttctcaagacgcagatgtgaagaaacgtggaattctttcgttatacggaatgtatagtgacgacaaaatggtcgacatacttataaagcaaattgatgaatgggtgcttcaaatgagaggaaagatagcagcggatgccgttcgtgctttaggtttgtcttcatctaagcttgcacttatgtctattcatgcaatagcatttaaatataaacataagcaagtacgtaatgcaacaaaagaagcgctaagtcttgctgtgaaaacacgtggtataacagaggaagagctggcagatcaattggtgccggacctcggctttactatacatggtgaaaaaataattgatttcgggaatcgaagttttactgccattttaactacagagtcaaaaattgaattagagacagaagaaggaaaacgtatgaagtcacttccaaagccgaatgcaaaagatgatgtagaaaaggctgaagaggctaaaaaagaattagcctctttaaagaaggaactccgaaatactctttccatgcaaaaacaacgattggaaacggcactttcattaaagcgttattggtcacataatgcatggaagtctgtatttatggataatccaattatgaagcaattttctatttcactcatttggggtgagtataaggaagggaagttgctgaaggcattccgttatgcagaaggtggcgtgttctgtacaattgacgggaagagttatgaactttcatctggcactgttattggtttcgttcatccgttagaattgtctggggcggagaaggaattatggaaagagcaattagaaagtgcgggaattgttcagccgttcctacaaattgagcgtccagtgtttgtagtagaagagaatgatgagagtgctattgagagatttggcggtattttactaaatggtcgttcgttattcggtaagatgacgaagcttggatggatccgtgggtctgttcaagatggcggtgtatattatacattttacaaagaagatactcgtaccggattaggagtgcaattgtcatttagcggagcaccgattggttatgaagatgaagaagatgtatgtgtatttgacattcaattttataaagcaggtacagtgaatcgtggttcatatgaatacgatgagattgatgatgaaagacgcattgtaccaaaagaagtagataaacgcttctttagtgaaatgttatatgatgtgcaagtagcgacagattcaaatcttgggcataatgaaagttggcgtagcgaacgataagaaaaaccccttcattggtaggaaaatgaagggggtttttcaatgtttcaaaaggttctttcataatagaagcgaattagggggaagaggatttttatccttttagaagggattggtatcatgatcaaatagatgatttatcatacgactacactgaatacagcgggaatagaagggaaaatgttaacgttacagccacggtaatgatagaaaagacttttactatatgtaagagtctctttttttgtaaacgcgacaaaatttgacaaaaaaatttgtaggaacttgttataatttctgttggaatattttgtttaacgagaaatgggtgtatagcgtaaaagatttcggtgtcatacaaatacattttttgttttacattcaaggatttcataagagaagaattacaaaaatgaatgacatggagaagtcatagggggagaggagatttagcatgagtattaaagtaataagagcaacaggggtaatgggaggagcagcaagagttgctgtaaaggtagataacgaagtagtaatgaaacttgagaataacgaagaatatacgcttccttttgaattagatgaagcgaatattaaagtaaaacaattcttttttggaagtaaagaaaagaaagtaaaggatggcgatgtagtagaaattaagataaatagtattgctatgctattactgatggtgtcaatgatggctgttttatttggttcgtcaattggtataaatattgttgtttttggtgtgataggagctttagttacattagtatacggattgaataactggtttcgtttagaggttaaataattattgtatatatatttatttcagttgatttactatacatgggatgaaaatatttttaagtgggaaatggggagaatcagtatgaagaaaatggttgtaatatctagtttggcgctaatagtaggtttaacaactggttgtagcagtgaaaaaacaagtggacctaaaacagtatctgtaaaaaaagaaaaagagttagtagcgaaagatatttttaaaaaagcagctgacggattaaaacaagaggaatatcttacattgacatctcttatgtcaatgaaggggagcggccaatcagaagaaattaaaatgaaaatacaaatggagccgaaactgaagaattctagggctgaaatgaaaataagtggtacagatattgtaacgtatgaagtagatggaaaggtcgctgctcaagtgaaaacccctgatacaggagagttagttacgatacctaataatcaatttaatgtaaatgatgtaatggtcagtaaaaatttacttaatgagttagatttaccggaagctttggctaagaaaatgaaagcaaagaaagatggagacacatataaacttacacttgaattaaagggaaaagaagcggtagatacgttacaaaaaattaatggagatatgaaaaaattaacggaaggatttaatatggatgcgtttaacattgaatatataataacaaaagattataaatttgaagagatgcgaacaactataaaagtgagtgaaagtaactcagataaaaaagctagtacagataaggaaaaattggatgcagttgtgagtataaagattgattcatatgaaaagtttgattcaattaagttaccagaagggattcaataatttcaatcgtaaaaggataaaaaggagcggaaatctgctccttttttatttttcctactatttttagaagatttatatgaatatagttgaacggcacttcatttttttctggaataaatgtgaaacgttgtataaaataatcaagaaaggcaaaaattatagggggaaagttgtgaagaaaaataagagtttaataagttttttaggagtgtttattatgttgttttctttttgttttcaaggaaatgtacaggcagatgtaaatactgttcaatctggaaaaatcaaatcaggaaacgtaacagtatgggaagttggaaatgtagcgaaagtattagcggatgtggagcgcttaaatttaaatacagtaaatgtaccgattcaagtagatatcccaaatgtgacttctactaacatggtaattaatcaagcgcaaaagcaacaagctattattttaattcaagaattattaaagcgtaatattcaagttatagtggaaccgttcccatatattcagcaggggaatgttggagagacagaatggaacccaagtaacattaatgatttcttctggaattggaagacggttattctgcaagatatttttaattccattacaagtaaatacaatgtgtatggactaaagattgcttctaatttcgtgaatatggagtatgcagaaggatactggagcgatacaattgattttgttcgtaatcagtataaaggaaatgttttgtatcaaatgaactggtggttaacagcaagctgggatccttcttatgaagcgaagtttaaagagaaaatcaatcgcccgtatttaaaaaagatggatattgttagcatagacagttggtttgaagtttcaggaaaaagaaatccaacatatgaagaagtgaagcaaagtttatttgcgacaacagtatataatcgtgggcaaaatgttgttcagcaattggaacaattacataatgcaacaggaaagccagtttacttcggtggatttaacgttccagcacgtgaacttggattacaaaatccatggaatccagatgtttcaaatgtgttttcgaaagatgtacaattaaatggatggcgtgcttaccgagatgtattagaaccgaaaccatattttaaaggtttttcaatttggtttattggctctaatgatagtacacatgcgtatcaaatacatagtaaagaagcagagacagttattaacgggtggtaccgaaaataatttttataaaataggtaagttttaaagtttactacatatatttttagtgaaaggcctttcaccatcttatcacctagggggcaatcataatgaaatttttgtcttaccttacagtaattttggtgattcttggcggtttgaattggttattggtagcgttagattacaatgtagttgagaaatggtttggttctatgccggcgcttgtggacactatttattggctcattggtctttctgctatttatcaaatttttgatcggttctttacgaacgactagctattattctttcattattagagtgttaagtacgattatgtacttaacacttttttatatgtccataaaaaagtctgcacttgcaagcgattccatcgcgtcttgcgccataataatagaaaacaaattgaccgtatattatattttaggttataattcagaaagtttaaaaatatccaaataagaaatagggaggttatgagggtaatggagagagtctataatttttcagcagggccatcaatactccctttgccagttttagagaaagtgcaaaaggagcttttaaattataacgggacaggcatgtctattatggaaatgagtcatcgatcttcttattttcaaagtattatagaggaagcgagtaacttacttcgtgaattaatgagcattcctgatgagtatgatgttttatttttacaaggcggtgcgtcattacaattttctatgataccactgaacttaatgaatacgtataaaaaagctggatacgtactaactggctcatggtctaaaaaggcactgcaagaagccgaaaaagttggggaagtacaagtgattgcttcttccgagcaagagaagtttactacgattcctaaactggacggtttactaagcgatgaaaaactagattatgtacatattacaacgaataatacaattgaggggacaaaatatgtggatattccacatatagaaagagtgccgctcgttgcggatatgtcttcaaatattttgtcagaacaatatgatgtttcgaagtttggtcttatatacgcgggagcacaaaaaaatttaggaccagcgggcttaacgattgctattataaaaagagatttaattgggggagcagatcgctcttgtccgacaatgttaaattatgaaacttacagtaaaaataactccttatataatacaccgccatcctttagtatttacgtaacaaaacttgtactagagtggttgaaagagcaaggcggagtatctgcgattgaagaacaaaatagaatgaaatcttcacttatttatcattttttagatgaatctaaattgtttacttcaccagttgatcctgcgtatcgatcacttatgaacattccatttacaacaccgtcagaagaacttaacaatgagtttttacaaaaagcgaaggaacgcggccttgttacgttaaaaggacatcgctcagttggcggtatgcgtgccagtatttacaatgcgatgccagcacacggcgtaaaacgattagtagattatatgaaggaatttgagcttgagaatagatagggagatggggatatgtttcgtgttcaaacgttaaatcaaattgcagaaaaaggtttgcaagtttttactgaagaacgttatgtagtaggagatagaatcaatcatccagatggaattttgcttcgtagctactctttacatcaagaagagttttcaaaagacttaaaggcgattgcaagagctggcgctggtgtaaataatattcctgtcgagcgatgtacagaaaaaggaattgtagtatttaacacgccgggggcaaatgctaatgcagtaaaggaactcattattgccagtcttattatgtcttcacgcaacattattaatggtgtaagttggacgaaaaacttagagggtgaagaagtaccacagcttgttgaatcaggaaaaaaacaatttgttggatcagaaattgcagggaaacgtctaggtgttatcggacttggcgcaatcggtgctttagttgcgaacgatgcgttagcgttaggcatggatgttatcggatatgatccttatatttcagttgaaacagcttggcgtctttctacacatgtgcaaagagcatttagccttgatgaaatttttgcaacgtgtgattatattacactgcatattcctcttacgaatcaaacgaaggggatcattggggaacacgctgtagagaagatgaaaagagggatgcgtctatttaatttctctagaggagaacttgtagatgaaaaggttcttcaaaaagcattagaagaagatattattacacattacgtaacggatttcccgaatgaaaatgtaataaagatgaaaaatgtaacagcgacgcctcaccttggcgcatcaacgtctgaatcggaagaaaattgtgcagtaatggcggcgcgtcaattacgtgaatatttagagacaggaaatattcgtaactcagtaaattatccaaacgtagaattgccgtatatcggaaagaaacgaattacaattatgcatcaaaacgtcccgaatatggtagggcaaattacaggatgcttagcggaacatcatattaatattgccgatatgattaatcgtagtaaacattcttgggcatacacaatgattgatatcgataacggaattgatgatataataaaagagaatattgtagaaaatataagcaaaattacaggtgttgtagccgttcgaatgattgtgtaaaggagagaggaatgtggcaaaaatacgaccgtttcgggccattcgtccagtagaggaaaaagcggcacaagtggcagctttaccgtatgacgtattaaatagtgaagaggcaagggaagttgtaaaagggaatccatattctttcttgcatgttgataaagcagaaattgatttagatcctgaattgtcaccgtatgatgatcgcgtgtatgaaaaagcgggcgacaatttaaagcaatttatacgagaagaagtgttcatacaagatgaagagccagcgctatatatttatgaactgacgatgcaaggaagaacgcagtcaggccttgtcgtttgtacatctattgatgagtatgaagatgatacaattaaaaaacatgaaagaacacgtcatgaaaaagaactagatcgtattcgccacgtagatgtgtgtgacgcaaatacaggtccgatatttttaacttaccgtacaaaagatgaagtaaagcatttaattagaagctggaaagaagagcatgcgccaatttatacatttacagcagaagacggtgttaagcatgttgcgtggaagattgcagatgaagatgtaattacgactttagtaaacgcatttgaagatattcctaatctttatattgcagatgggcatcaccgttctgcatcagctgcaaaagtaggacttatgagaagagaacaatatccaaattacacaggagaagaggaatttaatttcttcttatcggttctattccctcatgatgaattatcgatttgggactataaccgagttgtgaaagatttaaacggtttatcagaagaacagtttttaaaacaaatcaagcaatacttctatgtagaagaagcacctgtttctccgtataaaccaaatgaaccaaaagcatttggaatgtatgtaaatgagaagtggtataagcttactgtgaaagaagaaacatttgatgcgaatgatcttgttagaggtttagatgtatctatcctgcaagatcatttattaagccaagtacttgaaatacatgatccgcgttctgattcacgcattgattttgttggcggaatacgggggctagaagaactagaacgccttgtgaacagcggcgaatacaaagcagcattcgcattatatccgacatctatggaagatttattagcaatcgcagatgccggagaagtcatgccgccgaaatcaacgtggtttgaaccgaaactgcgtagtgggttgtttgttcattctttaaagtaaatattgacttctatagttttgaaaaaccgaaatgatttgagtttcggtttttcttattttacaagtgtttttgaggagggggatcgatgaaattgcaagtaggcgaaaaaattacctttgaaagaacgtttacaaaagaagatgttgcgttatttacggaagtatcgaaagatgaaggtgttcatcatgttacaccagatgagcaggggagatttgttgtacaagggcttttaacatcaacactacctacaaaaattggcggtgattataacgtactagctcgcaagatggattttgaatttttacgtcctgtgtttagtggtgacacaattcgttgtgacttaaccatagaacaatttgaacccgatgaaaaaaatcgtacaaatattactgcgatgtttatatgtaggaatcaacttgaaaaggaagttatgaaggggagtttttctgggattattctttagttagtaggaaaagtaatgaataggtgggggccatgtcactcgggcttaggtttttaattccaccataacgaaaatgatatgcattgctgtatattgataatatactctgttcatttttaatttgaataagctcgtcaacaaaaaggacattccgagtattacaagaaatgtcctttctgctaaaatgtaaggtattttgctaaaattcaaactctaaaatcagtttactagtttgacctgtaaactgataattataggaccctctcagattttctaagttaccggtagctttaataattgttcctggggaatctaaatttcctttatcaaatattccttgctctatagctgtgaatgtcccttgttgccccttataaattccttcaaagtgtaaaaatccagaaattttagccgtagccaagtgaccatcatttatatttgagtctagataatataataagtattcaacaaaagcttttccttttaattctccatcaatatcatattcaacatgggcaatattaatagggaaatcttttctagtatcatcaattagtttttcatcccatttacttactgtaaatgttacttccatacacgtaaatccccctttatcattagataagtaatctccatatcatttaaaaagtactaattcacagtcatatcttataggagtgtttttatttatttgagccctgtcatatcgttatcttatctcagaatcacctgcgcctccccatgaaggacttactgttgtcacggtgtctcctgcttgtaacctctttggttttattaacatgttaactccgctgctacagaatgtaatggattacgattatacaaactgtatcattgaaatacatgatgtatgacattagtttcttcatcatcaatccgtttacctgctgggattcaagaattcagtcttagtgttgaatataggaataacctatttatatttgaaaatcaaagtatgcaacattgcatgaggaaaacggttgttattttcactacctgtaactataatgattacaggttggtcgataccaatcaaaaaaataaaatcatcgtgaatggagatgtttcataatgggtatgaaaaaattaattttagcaggtgctttagggatcgcagcattatcaggaacaaatttaccaggactagaagtaacaaaagcgagtgcagcttctattgaatcgaatttctcgacgttagaaggacgagtagtagaagtagataacggtgtaattgttgtaaaatctaagcaatatgaggaaccggttagtgtgtatattgattcactttcaaatgtgaaagtaggagatgaagtaaaagctactggatctatgatgcgtaattttacagaatatatggttgcaactgcagttgaaaatacaacaaacaagttaggtatgcacatgaaagaagatggctcacctaattatgtaattggagaagtatcaaaagtaggaacgatggaagatgagggagacggtgctactaaatatgttgtagttgagtatccatcgttaaatgggaagaaagctattattgatgttttcttaacaaagggacaagtatttaatgcgggtgagaaagtgaaaattgatatgaagtatgtagggtggggcggaagttctattaactggaacacagttgaccatattgaaaaagttcatgaagcaaagacgaacgctgaaaataatgatggtgtatggatttggtcttaattaaaatcctgtaaataacaaatgtatcatgtagtatccagcaaatggtgatgtgtatgaccatttgctggatacttttttgctttgtattttattgagaataagggatatccgactagaatatgatgtttaaatcggtgcgagttaaaaaatacaataatgaaagaggggtttatatatggagcgagatgagaattatttacgagctaaaaaaagagtggagaatttaaaagcgttttacattcatttaacggtctatatattagttaacttaatgctttttttcataaatataagctctgattcaagtaaattatggtttttatatccacttggaggttgggggattggtatcgttatacatggtttaacaacttttccatttgggatattcggaaaagaatgggaagaacgaaaaattaaagagtatatggagaaagataagtgaaaaaatcagagatttatgaatataaatctctgtgagcacacgtttgatgcgaagcctattctatagcttcgcctatttgttttgtactcgaagttaatgcgagtacgtgttcctattcatttttagcatgaattgcatgtgaaatcaaaactttagttgtagtacataataaatacagttattttactttcttaattacaagtggatataggataaagttgatttatcatcctatattaaaataaaaaacaaaccactgttcgatttgaatattccacgatataatggtgagagtttatgacagaataaatatttacataagaagtgaggtactgtatgaaaaaaagaacgacagacattatttttattattattggtgcatttctttttgctttaggtgtcaatttatttgttatcccgaacgagtttggtgagggtggggtaacaggtatcacgattattacgtactatttatttgaatggtcaccaggtttagttaacttaattttaaatgcgattttgttaatagtcggttataaatttttaaataaaatcacaacaatttatacgattatcgctgtagtgactaactcgctatttcttcatttaacagaaggctggacgattgcttcggatgaaatgcttgtaaatgccattttcggaggaatatttatcgggtgtggtattggtcttatcattcgcgttggcggaacaactgcaggtactacgatcttagcaaggatgacacataaatatttaggctggagcattagctacggtctactgttcttcgatttaatcgttgcattttcatcttatttcatcattggtgcagaaaaactgatgataacaattattatgctatatgtagcaacgaaagtgatggaatttgtaattgaagggttaaatccgaagaaggctattacgattatttctgataatccagatgaaattgccgggaaggtgacaaccttaatggggagaggggttaccgtgtattcaggtcatggctattacacgaaaacgccgaaggaaattctttatgttgttattaataagcaagaagtagtgaagctaaagcggattgttcaaactacggatccggcggcgttcatcgctatacacgatgttcgtgatgtgttcggagaaggatttgttgatatttcgaaggcttagaaattgtttttgattaaaataatcttaatactaaaacgtaagaatctattttgaataatcttttttcaaaatagattctttttctttttcttgcaaaaaatccaattgtttcttaatgtagtgatgtagaaggatgaacgagagagggtttaatgaagatgatacatattttattagctgatgatgataagcatattagagagttgttgcattatcatttacaaaaagaggggtttaaagtttttgaagcagaagatggaaaggtagcgcaagatgttttagagaaggaaaatattcatcttgcgatcgtagacattatgatgccgttcgttgatggctatacgttatgtgaagaaatccggaagtatcatgatataccggttattttattaacggcgaaagatcagttagttgataaagaaaaaggattcatttctggtacggacgattatatcgtaaaaccatttgaaccagctgaagtgattttccgtatgaaagctttattacgacgttatcaaatgctgagtgcagatattattacgttgcacggaacgacaattgatcgaaaaggtgtagaagtaaagtgtaacggtcaaacaattttgcttcctttaaaggaatttgagttattatcacaacttgctagttatcctggaagaacattttcaagagaagagctaattgaattagtatggggaatggattttgaaggagatgaacgaacagttgatgttcatgtgaaaaggctgcgagatcgtttctcaaaacgaacggatgattttcaaattacaacagtgcgcggcctcgggtataagttggagttgaaataagatgaaatcactatattctagatttgtatttatgacggtcggcattatgctacttagtagtattatcggctttttattaacgaacgtatattatcaagtgaagttaaaaccatataacagtgaaaagattttaaagtatgcggaagaagttaaatcgttatatgaaaagcaaagtgaagaaaatcaagagacgtatttgcattctattgcaaaattagggtatgagatttacattgttgatgatcaaaagaatggaaagcgtatcggtaatgcgtttcgtaagacgacaataagtgatgataccgttcataaagtattgcagggggagacatttaatggtgtttctacttatccaacgcgcctctttattacaggttttttcgataatgaattaattaatagcgtcggtgtcccagtacaacacggtgataaacagtacgctttattcattcgccctgacgttcaacaacaattcggcgagatgagaatttttctagcggtattattagggtttatcgtactattaagtattatttttatagcgattgcagcaggttacatcgttcgcccaatccgtaaatttacgaaggctacgcaaaaaattgcgagtggggaatatgaaattgaattagatgtaaaacgaaaagatgaaataggaacgttatctacaagcttccaaaagatgacgaagagtattaaagaactagatgaaatgagacaagaattcgtttcgaacgtttcacatgaatttcagtcgccactttcttccatacaaggtttttcaaagacgttgcaaacagaaaagatgagtgaggaagaaagaaatcattacttacaaattattgagggtgaaagtaagcgaatgtctagtttatgtaaacagttacttacgctcgcttcattagataaagaggaaaaggttctacaaataagagaattcaatctgcagaagcaaattaaagacgtcatttttatgcttgagtggaaatggcgggaaaaagatatcgccgttgaatttaatgtgccagatatcactataaaaggtgatgaaaacttacttcatcaagtttggagtaacattttcacgaatagcattaagttttcaaacgatggtggaacgattgagtttttcgtcgaagagttagagtctagtgtcattatttctatatcagacaacggaatcggtatggaaaaagaagaaatggatcgtatttttgaccgtttttacaaagtagatacagcaaggacgagaaacgtagaaggtagcggtttaggattgtcgattgtgcagaagattgttgaactgcatcatggaaacgtttcggtgtatagtacgaagggggaaggaacgaccgttcgggtggagcttccgaaatagatggaaagaaagaggctgtttcggaactgcctcttttttgtcgttttatgtcggcaagtcgatataatcggaaaatcgctgatataatttgagctgcgccgatataattctatttgcgctgatatatttgaaaaatcgctgatataaatttcacgtactgtatttctgctataaagccacacctttcccgcgctcaaaaagtatcagatgtaatttaatttcccctctgtaatcttctgttcatattccgttcatatttcttttttatgataagtgcatagaaagaaagaggaaggagcgagcgaaatgtttttagctctgcgtgaattgaaacaatcaaaattaagatacggattaatcggactgattatggtgttattatcatttttagttcttgttatttcaggattagcaaatggactatcatatgataatgcttcatcgattcaaaatatggaggcaaataagttcgttttagcagatgatgcggaaaataaattacttcgttcacaaattaagaaagacgatgtagataacgtagtaaatcaagtaggcgagaaagaagccgttccgtttcgtgtgaaagtttcaacatatgaaaagaaagatagttcgaaaaaggttgatatcgctattttctcaagtgaacgtgattcatttttagaaccaaaaattgtaaaaggtgagaaattaggtacagcaaataacgaaatggttgctgacgaatcaattaaagaaaaaggaattgatattggagatacaattattgatcctgtttcaaagaaagaatttacaatcgttggatttacgaaagatcaaatgtttagccatacaccagttgtgtatgtaaatgaagacgtatggggatctatttcacaaccaaatcaaaaagattatagtgcaattgcgctgaatacagataaagaaatcaaaaatgcacatgttatcgacaaaaaagaagtactgcaaagtattccaggatttaaagaagagcaaggaacattgacgatgatcattgcattcttacttgttatcgctgcgttattaatcggtgtattcttctacgttattacactgcaaaaaacacagcaattaggcgtattaaaagcaattggtacgaagaactcttatttagcaaatagcttagtcgtacaggcgttattcttatcagtcgttgcgatggtaataagtattgttcttgtacaagggttagaacaaattttaccagctggtatgccattcttattaacaacaccgatgattgcacaatatgcggcaatctttatcgttattagtattttaggaacacttatttcgttatatcaagtattaaaagttgatgcattagaagcaattggaggcgggatgtaatgacttcattattaaaattagacaaagtaagtaaagtgtacggagaaggaaatacggaagtaacagcccttcatccgatgtcgcttgatgtgaaagctggagagtttatcggaatcgttggtccttctggatcagggaaaagtacgttattatcaattgctggtgctttattatcaccgtcaaaaggggatatttacattcgcgagcaaaatattacgaagctatcagaaaaggaaatgacagacattcgtttgaaaaaaatcggcttcattttccagtttgcaaaccttgttccatatttaaatgtgaaagaacagttactttacattgcaaagctaaaaaaagaaagtaaacaagaatccggaaagcgtgcagatcatttattagcggcatttggattaggagaaagaaagaatcattatccaaatcaactatctggcggggaaaaacaaagggtagcaatcgctcgtgcgttcatgaacaacccagatttaatattagcggatgagccaacggcaagcttagactcaaaacgcgcacgtgaagttgttgaaatgatgaaacgcgaagtgaaagagagccaaaaagcagcaattatgattacacatgatgaaagaatgcttgatgtatgtgatcgtatattgacgcttcgagatggacagttaatataaaaaaaggaaaaccgtacatgtatgtgcggttttcctttttttatggacttatttagagaataacgttttaattttattacgagtaagtaataaaacaccgcctaatacagatagcattcctagagccatattgtttgattgctcgctaccagcgttaggaagttctttagcgttattgtttttagtaccattatctgcttgcgtttgtttagactgtgatacttcattaatcttgttgtcaacattttgcttcgttgtatgtaactcagctaatttgtcgtcaatttttttctcagtatgcttaaagtcgttgattttaatatctaagtcttgttttttctttgataaatcatctgaaacagtttgtttcgattgtttaatttcgttaattttattaattaaatcttgtctagcttcttgtaaaacagctagtttgttttttacatcttgtttagctaattctaagttagcggaaagactgtctaaattgcctttaattttcttaagttcctctaacgtgttaccggtattcggcttgttttcttttagttcagcgagtttgtcctcagcagtttgtttcgctttttttaactcagctaatttttcatctacttgttttttaacttccttaagttcattaaccttttgatcaatgttctctttatgttgcttcatttcattcactttttcatcgacagtttgtttatgttctttaatctcattcactttgttatcgatattttgcttatgttcttttacttcagcaactttatcttctacttgttttttatgctctttaatttcagcgattttatcttcggcaatttgtttgtcttgctgcagttttgcatctagttcttgtttatgctgtttaacttcgttaattttttcatcagcaacttgtttacgttcatgtagttcattcaccttcgtatcaacattttccttaactttgttaagttcgtttaatgtttgatccacgttttctttttgttgctgtaatttcgcatctaactcttgtttatgttgcttaatttcagctaatcgatctcctgtactttgctggggagtagtatcatttacttccgcatgagcagagttcgcgccagcaatcattgctaaagctagtgtagacgcagcgattgtttgttttgttttcatatttttgtacctcttttctttcatatgcatgagctgttttgtgtaaaattgagcatatagaagtagattcttccatcattatataccatctgcgctgcctagaggaagtatttgcataataatctatgattatgtaatttttataatctcttattttggagtaggggataaatctttagctagatgaacaatttcttcaatagtaaagcttatatctttattattgcgaataacaaacaaataatcagcctcattttctataggatctaccacatcatcgtgaagtgattcagtttgttgttgatcaaatacttctttgaaactagaatatccacctctaaaaatattggtacttcgcgtgcttcgagccactctttcgtaaagtacatcatctggaatgtcaaaatgaacgagtatgcgtacatattcattctgtggaaataattcgtttagtaaatataaccttccatttttactgcgattggagttactaataataaggtgtaaatttgtatgttctttcgcataatcaacaatgaatttagaaagaccgtgcttaaatgtattagcaccttcagccggctgtaatttttcatcatgcgtgttaataaattcagcttgtttatcttgatccataacgaaagagtggggtaactctttttctaatgctcttgcaaatgtagtttttccactgtgtgtttttccaactgtaatgatgactaatctttttatgacgccctccatttgtattgttatgaactggaatattcggtgtagatcgaaatcttcctgctagagattacacaaattgttgagcgttagtaggctgaaaacttgacaaaaaaacttatttatgctataatttaccaatataaaaataaagtgtataatagggttctcctggccaggggaaccctatttttgttgtaaaaatgaaggagagtgtatgtacgtgaaacaaggtgaagcaagtgtaacgtcgttagtatcagctttcagcagggcatatcatagtgaatttgataatccgaaggtctttgatgattatatcgctaaagaattcatatcgccaaaagaacgtaacaatattgaaacgaacatggttcaagggattcactttttcaatacagacattgcagagcggtttcaagacaatccaaaagaaatattaaaatggattacacaagttcagttatcaccaacacctttagcacgtgccgcatattgtgaaagagtattactacatgaaattacattaggagcgaaacaatacgtcatactcggtgcaggcttagatacgttcagttttagaaaccgagagttagagaataaaatagaaatatttgaagtggatcatccttctacgcaggcgtttaagaaggaaagaataaaagaagtagaacttgaagttccaaataaccttcattttgtttcgatggatttcacgaaaggatttttctatgagcagttacggaatgaaggatttgaaaataaaaagacgttctttagtctattaggtgtaacgtactatttaacgaaagaggaactttctagtttaatagaatgtttatttgaggtggttccggcaggaagttctatcgttttcgattatcccgatgaaaacttgtttacggaaaagggactgtccaatcgagttgaaaatatggtaaaaatggctgcggtaggcggagaaccgatgaaatcatgtttttcttatgccgaaatggaagcactgttagagaaggcgggcttactcatttatgaacatttatcgccagaagacataaataaattatattttgaaggacgaaacgattatttgaaagcttttgagacagtgcattatgtgcatgcggtgaaaaggtaggaaattagtaggcatggggaggaatctctgtgtctttttttataaaaaaggaaatgagctgtagtggtggaaaatataattataaatatatataaattaatgttttgtagaaactaaaggaaaggggaaatagaagatgttgaaattacaagggaaatacaatgaagcaaaagtgtttactacgaatgtagaaaaaactgcagcaggtcaaattattgatctttgtaaccaagaattcgtaaaggatagcaagattcgtattatgccagatacacatgcgggtgcaggttgcacgattgggacaacaatgacaattcaagataagattgttcctaatttagtcggggttaactaatcggctcagactttaaactactcactcaattgactgggaaccctaacgataaaaggcgagggcaatcagcagccagtggttatggtgacataatcgaatggttcagagacttgtaccatgttagcagactaaggtacagaattattcctcatctattttgaattgaagaggaataattaatacggtgagcctacagtagagactgcatatctcgatgactgtagagaaggtatagtccactctttcaggaaactgagaggtaagtacgatattggttgtggcatggaagttgttatgattaataagaaaaaagaggaaatcaacttcgatcacttagacgaaacgatacgtaaatttgtcccaagtggttttcgtattcgagataaggaacatagattttcaaaaatgattgattttgatagtgtaagagccccgtttacattgcaacgtgctcaaaaaagtattggtacacttggcgggggcaatcattttgtcgaactgaatgaggatgataaaggaaatgtatacattgtcattcatagtggttcgcgtaatttagggaaacaagtagcagagtattatcaaaactttgcttacgagcaacttataaacgttaaatctattaaagaagaactgattgagcgtttaacgaaagaaggtagacaacaagaaatacatgaagctttacgtgaaattaagaaaccggtgattcgcaaagaattagcttatttagaaggacaaggatttaaagattacatgaatgatatgaaaattgcacaaaaatatgcagagttaaatcgtaaggcaatgattgatgaaatcgtcactaaaatggattggaaagtaaccgatcaattcactacaattcataactacatcgatatggaaaatatgattctacgaaaaggtgctatttcagctcagaaaaatgaacgagtaatcattccaatcaatatgagagatggttcaatcattgcatttggtaaaggaaatccagattggaacttttctggccctcatggagcagggcgtattatgagtcgcaagaaggcgaaagaagtacttaacttagaggattttcaaaatacaatgacagaggtttggactacatctgttgcagaaagtactttagatgaagcaccaatggtatataagccaatggatgaaattattgagaatacaaaagaaacaattgatattaaacatattattaagccactttacaattttaaggctaattaaaagaggagtaacgtttattaaagaaagaaaacttgaaaagatagcatattttgtggcggttatataacagagattaaaaagacaacatattaaactaagagattcatcatattcatttacatttatgtaatgttaaagactaaaaagctagattggcgcgaattgctaattgtggagtgtgtagaaaagacaaaatctcttaaaaaacacttaattttttattccattaatctttacaatctccccctataatgtgaattggacaagcacctaagagaagcagaatatgtcagttggtacattctattattagggggagaatttgtatgaaaaagacagttgcttcgttagcagttatggcggcattattaccgacattttcagcacatgcggaagggaaagagcaagttcgaaaatcagctacaacttttaatgttattagtgacattcaaggtgatttaggagattttgatcacgtattaaaagatatgaataaagtaacgccactttctagagcgcttattatgaatggggatataacgccgactggacaacagtcacaatatgatgatgtaaagcgtgtgttaaataaaaataagcatccagaaaatgtatggtctactgttgggaatcatgagttttatgctggtaaatggacagcagatgggaaactctctcaaagtacatggccaaatggtgtaactgaggaaactttatttaaccgctatctgaaatttagtggacaagaaaaggtatatcataaaaaagaattagatggctatccacttttatttttaggaactgaaaaatatatgaaataccacgattcaaaaatgtgggatgaagtatatatgagtgatgagcaattaggttggttaaaacaaaatttagaagagtatagtcaaaaagataaaaataaaccaatctttattttctctcatcacgttttacctgatacagtatctggatcaagacaatcaccatatttacaagattatttaaacgtggataaattgtacgatatattaaaagactatccgcaggttgttttcttcacgagtcatacgcattgggatttaaacttacctgactgggctggtaaaaagaaaattaaaggcggagatgaaaaaggtttcactgttgtaaatacgggcgggattgaaacaggctggatgtcagcagggccaaatggaggagagaaaactgctccagatggctattcatttaaacaagggttacaagtgaaagcatatggtaacgatgtaattgtgacagcttacgattacaaacgtgataaggatataaagaagttattaattagtgattcaaaaattgcgcagatggcaccaaatgtaacggcagatgatagtgaaaatataattgtcggtgcaactgaatatatggagtattctatagaaggaacgaatgagtggcatacgtatagtaaagcaaaccctccgaaatttgatggggataaagtcgtatacgtacgccataaaggtgaaatgaatttagagccgggattaacacagttacttcgtttttcggtaaataagtgattggagggagtctgcatttgaatgtgtaggctctttttttgttgatgagaaaggaggtgcctgtctgtcgttttttgtcgatagatcgatatattaagaaaatcgttgatatattgcaagttacgatagatacatttgaaaaattgttgatatattgtaaggaatgaacgatatatttgaaaaatcgttgatgtaaatttcatgtaccgtaattaagttaaaatcattaatacggttttacttatcaaaacgaaattctaatacatttttaaccgagaaaggtgacttcaccatttttacgtgtaataatagtaacgttacatatattgtgaaagaagtacaaaaggagcgttacaatgaatttagctaaattcccgagaaaaaaatatacagaatcatatacaccaattgaaaagttaaacaacttttctgaagcacttggtggcccgactatttattttaaacgagatgatttacttggtttaacagctggtggcaataagacgagaaaattagaatttttagttgcagatgcacaggaaaatggtgcagatacgttaattacagctggtggtattcagtcaaatcattgccgcctgacacttgctgctgcggtaaaagaaaaaatgaaatgtatccttgtattagaggaagggcttgagccagaagagaagagagactttaacgggaactatttcttatatcacttattaggtgctgaaaatgtaattgttgtaccgaacggagcagatcttatggaagaaatgcataaagtagcaaaagaagtaagtgaaaaagggaatacaccatatgtaattccagttggtggatcaaaccctacgggtgctatgggatacgttgcttgtgcccaagaaattatggcgcaatcatttgagcaaggaattgatttcagttcagttgtttgtgtaagtggaagcggcggtatgcatgccggtttaattactggtttttctggaacgcaaagccagattcctgtaatcggaattaacgtaagtagaggaaaagctgagcaagaagagaaagtagcaaaacttgtagatgaaacttcagcacacgttggtattccaaactttatcccgcgcgacgctgttacgtgctttgatgaatatgtagggccaggatatgcgttaccaacgccggaaatggtagaggcagttcagttacttgcgaaaacagaaggtattttacttgatccagtgtatacaggtaaggcggtagcgggattaatcgatttaattagaaaaggtaaatttaataaggaagacaatattttattcgtacattcaggtggttcaccagctttatatgcgaatacttctttatttgcttaagtgtaaaaagcattgggtatccaatgcttttttgttatataatggaattgctgggaggcgggaggatgatatgaattcaaatttaaaatggattatatatacggtactcggcatttctattctattaatcttatttgtggcttatggggtgtattcttattttacattttaaaagcgtaatggaagtgaaccataatgtaatgtatgttatagtttgatatgttaattacttacaatactttctacaaggagaatacataatgagagcaaagaaactagtaacgttagcagttccatttatgctgttagtcggatgcgaggtaggagataaagattctactcataagactgagcaaactagtaaagcaataacgaaaacagtaatttctgaacaacagtatctgtactacatatgtgagcaagtggtagagttccaatttaagaaggatgaattgttactaaacttaggagaatccttaaaggacaaagaaaaagcaaaagctgttttaaaaacatcaaacgagatagataaaattttagacaatatggaacacataaaagtacctgatacatacaaagacattcacaaatccatacaagaaggggtaacagaggcaagaaaagcaacgaagttaattaaggatgctggtaaagaagataaacagaagattcaagaagctacaatgaaaggtactgaatttttatcaggtgtagacggagagcattggaaaaaagcaatttatgagttatcacaggaaaacaaagatgcttatagtaaggcacttgataagaaagtaaaggagcactcaaagtaaaacagtaacttgtaataatacatatccacctaaaatttccgcgaatgctatgctaggaagttaggtgggagattactgtccttaaatgtggttgattaaagctacagccacattctcctgttctaattaactaaaagaagaacttccccatcccgattagactactgatcattcctattccactcatggtaccttttcctgctgtaagtaagtttccaatcattcccagctgcccgtaacctccgttattcccccatcccatgggacttatctgtcctccccatcctggagagtttccgaaaatacccccgttattggtattgaatttaaaagccttagctggcggcgatagtaaagctgcgagatgaccttgtgcgaacatccctgtatgattgaatggttgcgcccaggggaagggaggtttttgaaaattaaaacctgcatgacctggtaatggagtccaattagcagggtgaccttgtggtagtatctctgcataattaattggctgctgcccccaagagaagggaggaggttggggattgaaccccgtataattggctgatgaatcccaactaactggatagactcggtaactccaattctcaggaagcttcaaatcattcattacctcagatgtagttatttcgggctgtgaatataatgaaatttggttagtatattgttgcccatttccctttgaattcaaataccaatattggtccatacgcttattctcctcactttaaaaatgtaatgttagacttagcctatgtaatattcctttttatggatggttacataactagatctacaagcctgtatttaaaggaatgggtgcgtagtctttttgatttttctcgctgcctgtaaaattcccattgatgtaaagtttcactttattttagaaggggattttcagttgcttcttttttgtatttcagcctaatttaaattccgttaacaaacatttttataaaggtttaatcaacaaaaagattttaaaatggtatgttgagcaagtggaattgctaaaaagagaatatccattcgaagagtttggcaaaatactgtaagggtaatgttttcttgtgcaaatatgtaaacgatttaaacgaatcaatgaaatttataatgaaggggcaattaaatatatgagtgaaacattacataaaagaaaaccaccatatgtaatgcttgtaatcctttttattggggcatttgtttcatttctaaataactcccttttaaatgtagccttgccatcaataatgaaagatttaaacattcaagattattcaacgatccagtggctttctacagggtatatgcttgtaagtggtatattaattccggcctcagcatttttaataacgcgtttctcgaataggagcctatttattacatctatggtgatttttattcttggtactgccttagcggctgtagcacctaactttggtttattacttactggtcggatggttcaagcggcaggctcttcagttatgggacctttgttaatgaatattatgctagtaagctttccaagagaaaaaaggggaacagcaatggggatttttggactagttatgattacagctccagcaattgggccgacactatcaggttatattgtagagtattatgactggcgtttgctttttgaaatgattttaccgttagcaatcattagcttactgttagggatttggaaatctgagaatgtcatgaaacaaaacaaaaatgcaaaacttgattatctctcattactattatcttctgtcggttttggcggtttgttatatggattcagttctgcaagctccgatggttggacaaataaagttgtcttaacaaccttaatcataggcgcaattgccctaattgctttcattattcgtcaattaaaaatggatgagccgttattggatttacgtgtttacaagtacccaatgtttgcacttgcgtctgtaattgcaattgtcaacgcggtggccatgttttcgggtatgattttaacaccagcttatgtacaaaacgtccgtggcatttctccgctgagctctggactgatgatgcttccaggtgcggttataatggggattatgtcaccaattacaggtaaactatttgataaatatggtcctcggattcttggcatagtggggctttccattacagctgtttcaacttatatgttggcaagtctgcaaattgactctagtcacacacatattattcttatctacacactgcggatgtttgggatggcgatggttatgatgccacttatgacaaatggtcttaatcaattgccaactcgcttaaacccgcacggtacagctgttaataatacggctcaacaagtgtccggttcgattggtactgctattcttgttacgattatgaactctgtaacaaaaacaaaagctgaaagtttaatgtctcatatagatccaacaacctttacagaaactacgaaggcaatagtaactcagaaggctttattatctggaattcaatattcgttttatgtagcgcttggcatgaatgttgttgcactactattagtttttttcgttaaacgtgtagatacaagtgcggaagctgtcgagaagctaaatcggtagagaaaaataaaacgcttgataatgattccaacaagttttttgctgctaaggcgccggtatttaaagctggaaaagaactaaaagaagcagggaaataattatatagtaaaagaggacctgatgttcatatcaggtcctctttcattagtaacacggtatacttgcttatcgtattggtttaactaaactactgatttttcgaatactacaatcttaagctcgtcaacttctctatttttggggtgttttagaagaaaaatgaatcaaaataatcgtttttataaacaaatacaagagatgagatccgtttgcaatttctcataaacattacaagtttagattatcttttaacaccaacattaaaaggctccaactatatttattcgcttcattttaatttagtatttttctacaagttataagtctaattgccaagcttatacgtaatatcataatcatgaatagttagggaaaagataaaataaggtaatcaattacatatctttatcccaggcgattagttgctatttcctctttattaaatgggatatgttatttcatgcttttttgaaagggtgttttaaatggaaaaaaaagtatctgccattcctcagccgaaaacatatggaccgctgggtaatctcccattaatcgataaagataaaccgaccctatcctttatcaagatagcggaagagtatggtcccatttttcaaattcaaactttaagtgataccattattgtcgtttccggacatgaactggtagcagaagtctgtgacgaaacacggttcgataaaagtatagagggtgctttagcaaaagttcgcgcctttgctggagacggattatttacaagcgagactcacgagcctaactggaaaaaagctcataatattttgatgcctacatttagccaacgggcaatgaaagattaccatgctatgatggttgatattgctgtacaactcgttcaaaaatgggcacggcttaatccgaatgaaaacgtggatgttccggaggatatgactcgtcttacgttagatacaattggtctatgtggttttaattaccgatttaatagcttttatcgtgagacccctcatccttttattactagcatgacccgtgctctagatgaggcgatgcaccaattacagcggttagatatagaagacaaacttatgtggagaacgaaacgtcaatttcagcatgatatccagtctatgttttctttagtagataatattattgctgaacgtaaaagtagtggagatcaggaagaaaatgatttactttcccgtatgttaaatgtacaagatccggaaactggtgaaaaattagatgatgaaaacattcgtttccaaattatcacttttttaatagctgggcatgagacaacaagtggattgttatcttttgcaatttactttttattaaagaatccggataaattgaaaaaagcctatgaagaagtagaccgtgttttgacagatcctactccaacataccaacaagttatgaaactgaagtatatacggatgattttaaatgaatcactgcgtctatggcctaccgctccagcattcagtctctatgcaaaagaagatacagtgattggcgggaaatacccaattaagaaaggagaagatcgtatttctgttcttattccacagctacatagggataaagatgcatggggagacaatgtggaagaattccaacctgaacgatttgaagagctggataaggttcctcatcatgcttataagccatttggaaatggccagagagcatgtatcggtatgcaatttgcacttcatgaagccactcttgtaatgggaatgcttcttcaacattttgaattaatcgattatcaaaactatcagctggatgtaaaacaaacattaacgctaaagcccggtgattttaagattaggattctaccccgaaaacaaactattagccatcctactgctcttgcacctacagaggacaagctgaaaaacgatgaaattaagcagcacgttcagaagacaccttctattattggggccgataatctttcacttcttgttctgtatggctcggatacaggggtagcagaaggtattgcaagagaattagcagatacagctagtttagaaggggttcgaacggaagtggtagctcttaacgatcgaattggaagtttgccaaaagaaggagcggtacttattgtgacttcttcttataatggaaaaccgccaagtaatgcagggcagtttgtgcaatggttggaggaactaaaaacagatgagctaaaaggggttcaatacgcagtttttggttgtggagatcataattgggctagtacctatcaacggattccaagatacattgatgagcagatggctcaaaaaggagcaacaagattttctaaacgcggagaagcagatgcaagtggtgattttgaggaacagctcgagcaatggaaacaaagcatgtggtctgatgcgatgaaggcatttggattggagctcaacaaaaatatggaaaaagagcgcagtactttgagtctgcaatttgtcagtcgtcttggaggatctcctcttgcacgaacatatgaagcagtttatgcgtctatactagaaaatcgtgaactccaatcatccagcagtgatagaagtacacgacatatcgaggtatccttgccggaaggcgctacatataaagaaggagaccaccttggagtgctgccagttaatagcgagaaaaatatcaaccgaattttaagacgctttggattaaatgggaaggatcaagttatactgagtgcaagtggacgaagtataaatcacatacctttagacagtcctgttagtttattggaccttcttagttatagtgttgaagttcaagaagcagccactcgagcacaaatacgagaaatggtaacattcacagcatgtcctcctcataaaaaagaattggaagcattattagaagaaggagtttaccatgaacaaatactaaagaaacggatttcaatgttggaccttcttgaaaagtatgaggcttgtgaaatccgatttgaacgctttttagaacttcttcctgcgctcaaaccgcgttactattctatttcaagctctccactcgttgtacagaatcgtctgagcattacggtcggtgttgttaatgcgcctgcatggagtggggaagggacatatgaaggagtcgcttctaattacttagctcagcgtcataataaagatgagattatctgtttcattcgaacgccacaatcaaactttgaattacctaaagatccagaaacaccaattattatggttgggccaggtactggaattgcaccattccgtggattcttgcaagcgcgtcgtgttcaaaagcaaaaaggtattaacttaggagaagcacatctatattttggttgtcgtcatcctgaaaaagattatctttatcgtacagaactagaaaatgatgaaagagatggattaatctctttacacacagctttttctcgtctagagggacatccaaaaacatatgtacagcatttaataaaacaagatagaatcaatttaatttcgttattagataatggagctcatctttatatatgtggtgatggaagtaaaatggctccggatgtagaagataccctttgtcaagcgtatcaagaaattcatgaagtcagtgaacaagaagcaagaaattggttggatcgtgtgcaagatgaagggcgatatggaaaagatgtttgggctggtatatgactgtttcttaattagatacatattaactaataaacttctttcgaataaatttcactttattagtatcgtgtatttagatgaatagtgattaaccggactatttagtatctactaaataaaaaacaggacctgatatgcatctatcaggtcctgtttcacatagacattatacatcgatattttccacgcattatcaatgtttgtaatgtagttagccttttgagtcagctataaaatcagatattattttttcaatatcgaaaggagtaatccctttatccaaagaaaaaatgctttctgcttcttcgatgtcttgaacgagttcacctctagcttcaatatgtaatcggaacaagtcatataaattcggtttaactaaattagttaaagccttcccaactagtatcatacctttttgattagcctcgatggtattatcataagttagatctctcgtaagagacaaatctgtccaaatcaattttcgttcctttaagtctaaaataactggaatagagatttgggtgtcggcagtaatatccactttatcttgaacagtagaaggttcaaatatttcacctgaaccaggatattgacgaaccatccaaccagtaaagcattctggtaaatctttatacggttggtctgtgtaagaaagcaaagtcattactacatagcgtgcaccatatttcagcacagacggaatatcgaaatcaatgaattcagatgccccctttggtgcagaagtaatatctccgctatggtaggctttgaaattttttgaacgtaagttcgtgaaggatacatgttctttgtattgccaatcttcgtcgtacattgcagcagataaatcaatgtcaacacgtcctgtatgttgtccattcacatagccttctttccaccataggaaaaaacgaatcgtatctccttctggcaaatctactttacttcctcgagataatgtgcgaagcgctttgctggctgaacgttgagagaagggaactaagtgattttttaactgttcatccaaaaatacttttccgagacttggaagttctgcgaagcgattttttaaagtatcttcacacatttttacaatcattaaacaaatatcctctgagataaatggaagtgtattttcgatacctatagcttttgctacatttccctttggaaaaaaggtacgaaattcatttttatcatttcgatgcttaaaatgagctgtgagttgaagtaatacaggagtagaaacgtttcctattatacttagaaaatcttcgagaatattgaaaacatctgttgacttatcactacataaacggattaaatgatccaagcgtctggcaaattcccccgggcgagtttttaaaagattttttgctgtcatgatatcacgattcaacaaagctgcttctatttttccattaaatgtttcaactttaatgttgttgcgaagaatctcaaatgctcggtgggtttttgggaaacgagtatgatattctgctggatgaagaatttcacctaaacgaatccaacgttttttgtatcgaagcatatcttcggtaatgtttccgcattgctctaacaatcctaaaaggaagcgtctttctgctcggttaaacttcttgaatcggacggaggatgctaaactcacatcgccttcagataaagcaactgcaaggcgaagaacatcagttgctgttttaaaatactttgcagcagcatcggctgatatttttctgtttattaataaaaccccaattataaaagacatattttccttatgaggaattacattaggtagaaaacaggaaacatcttcagtgtgtgtaatagcccattctacatccgtcttatcagttgaggaaatagagctgtttgcactaatcaattgagaaatcatttgattgaaatcttcttcacttcctaagtcaataactttcaaatcaactctatctaaaagagggagtcgttcttctacttttgatacaggtaggcgcaacgtcacataatgaataatggcattaatgtataaatcagcgtcacttaaatccatcatttgttgcggaaagtttggatacataggagtaaactgaatatgtgctccaaccatttcttttaaatgttttaccaattctttgtaaaacgatgtgaatgcatcaaccgaaagtgtttgcaactcttctattaaaggctcggaaaaagtaaatcctaaattttccaagttttttaaaacagtggctaaataaatgttcggtagtttattttcttctctttttataattactttcaaacttcttcttatgtaaatagaatttttcatgagaacgccagctattcacgccttataaaagaggggaatagtctgactgtcctcctttcagtggtagatttttatttttatatgtataaacacactaattgtagaaaaatgcacagagggtacatagctattttttagtggaaaattagggatataacatttagttgttaagtggtaatttgttaattaagaaaagaaaacctctacatcaatggttgataaactaaagtttatgcaatcccaaagaagaaagaggttttatagtctaattatttttcatagggaattgacaactctaaaacaatttgaaatttctacaaagaaggaagaattgtcatagcctatgtgtttagcaggaaagtaacatccctatttggccaaagaagttagaaggaaggaacgtcatagcctgctttattagtatattctcttgcgaagagcaattcaagtatactgtctgattttttatttttttcttaaaggggaattttcatgattatcccgcattaacgggcagccagattggtgagggtgattaaagtttcactttataaatagggagaccatcacatgccctttttataatgctattacgggaggatttttatttttgatatattataccatttatttaatggtataatatggtatgcgttctgtggaatggagttgaatgagtattataaatacaaaaggtgaaattaaaaaaacgaaaagaaaagtattactaactatacttactatgttagtaattataattggatttggatattggaaactttttagtttgcaaggtgttccaaaaggggaattaattcgaacagtgaaatctccagatggaaaatatctcatcaagacttattttcataatgcaggatcattaagtgcggatgctgttaggggtgaattagttaaccttgatacagattcagagaaaaatatatattggaactatccagatacagatccatatattgaatgggtaaataagaatattgttagaattggagatcaaactttagatgtttcacagaaagaaacctatgattggcgtgatgacgataagcacgttaaagaaatgcctaaacagtttattagataaaataagaaaaattaaatttatttaatcttattcgtttaactatagataggattatatgagtgaaaaagtccatttagattttctaaatggacttttttagatttctagatacgactactgataaaaatggaacaaacttgttatttaggttgtctattaagtatacgtataaaacaggggttcatgatagttcactcattttatgaaaagtgagatgcaagagagtgatatccgatacactctttaattgtatcgatatgtataacatctaaaaaacatatattcttgaaagaggttgaaaatgtatgatagtcttaaacaagttttttaacattttacattacaaaaagatggtacctgtagtatttctttcatgtgcaacgcttataggctgttctgatggtaatactcaatctgaattacctaaacaaacgaaacaaacaaatcaaatcaaacaagaaattactggtaatgattcttttgttaaacttgaaaaagaatttgatgctaaactcggtatttatgcattggacactgatacgaatcaaaccgttacttatcaatcagatgaacggtttgcatacgcatctacccacaaagctttagctgtgggagtacttttacaaaagaaatcaatagaagatctaaatcaaagagttttgtatacccgtgaagatcttgttaattacaatccaattacagaaaagtatgttgatagtggtatgaccctgaaagagcttgcagatgcttctcttcgatatagtgataatactgcacaaaatcttattcttaaacaattaggtggacctagtgaattcaaaaaatcactaagagaagtaggagacaccgttacaaatcctgaacgttttgaaccagaattaaacgaagtgcctccaggagacgtacgtgatactagtaccccaaaggcattagctactagtcttcaggcttttacgctaggagatgtactttcaactgagaaacgggatttattaatagattggatgaaaaggaatactaccggagacaacttaattcgtgccggagttccaggaggatgggaagtagctgataagactggctcgggatcttatggaaccagaaatgatatcgcaattatttggccaccaaataaaaaaccaattgttcttgcgatactttctaatcatgataaagaggatgctaaacacgatgataagcttattgcagaagcaaccaagatagtgttagatgctttaaaagtgacaaataaataataatagtaactagttattattattttcccggtttttcgtcacaatattgtgagtcatgattttgctagcggactaatgtttatggggttcttcgttggagttgcatttttagcaacgatggcaagttgcttaatgtttaaagttctgtcgggagcatcaaaagatgtggcacgttatcaaacgtttcgtaaaattgttgtccgccgagaattattaacaaactcaatctataaagagttatacttcatatttttattcccagcaattgtcgggattactcatatattatttggtatgaacatgtttagtcctattttaatcaatccgtactctcgtatttggttaccacttgttatttttgtagtaatttattcgatttattacttgattacagttcaattatataaaggaattgtactctcgaaaaaaagatcaatgtaatgatgttattcataaagaatgatagataatcctttttggaaagaacaattaagagagagataacattaattatcgactgtatcgaaagtgaaatcacttctttacagaaggagatggagaattaagtcaatcgaatgaatattatagcctgctaatatcccagagtatgttataaataatattgccacttgggtgcaaggaagattgaaatgaaattagcaaccatatttttaaatagttattttcagaggcaacaagtgtattagggagggggcatttggcttagaggaatcttcatgtgaaaagacctgaaacagccttccctatagcaataataaagatgtctaatttctaatatagaaaataatagcgttgctacattcaatatgtagcaacgctatttaaattttttaaacagggttaaatttttcaagaaatttacctataaaaaatgatatccaattaaattcataagtttatcctctatgtattttgtaactacatttcatcttgctgtaaagaaacaaaaaacacttttttattcaataattccaatttctagagccttttgaacagcttcttctttgttactgactcctagctttgtataagctgtggaagcataatttctgaccgtaccattcgataaatataaccttgatgctatggtagtgtaacgaagtccttttgctactagctgtaatatttctatttccctagctgttagctcataagcggttgcttttgattgtggtgtctcttttttctcatcaaacttctcaaatattttgtgagacattccctgatcaattagtgtcccacctttgtgaataagtcggatcgtattggctagctccaacgtttcaatagatttaagtaaaaaaccatccgcaccgttgcgaagtgattccactgcctgttcggtatcttgaaacgttgtaaaaatcaatacgcggatatgtggccattgttgcttaatctttttggttgcttcgattccatccatgtgctgcatatctaaatccataagtataacatggggttgaaggcgcccacacaaatcgatggcttgattgccatcctcagccaagccgactacatttaaatcttcatatctatcgagtagtgtcctcaaactttctcgaacaaatggctgatcgtctacaattaacaaacgaataagtccattttttatttcagtttgtcgcggtatggtgcatgtaacaagcattccttcttctggctttgtatatacagacaaatgaccttgcaagttcattgcccgttctttcatcgcattcataccgaagccttcctgccattctacatttccttttccattatcttgaacttctaacctcgtatattgttgttcaaactgcaatgaaactataatttcagtcccttgaccatgacgtactgcattcgtaagggactcctgtaagcaacgaatgaatgtgatcttcgcttgccgagatagttgatattcctctccgaatgtcctaaaacttacatttacctgagcgtgctcctgaaattcggctccaagattttgtagagattgaattaaggaaggcgattgacatggagaatccatttgatgtaggtaacctctcacgtcctcgatgcttttacgtcccatttcaagcagagaatctagcctctgtatacccatttcagtagcaagttcggtacgcaacgtttccatccccataataatagaagtataagcgtgaccaactgtatcatgaagctcattcgacagtctgttccgttcttctgccaatgtaatgcgttcaatttgagacatatattgctcaagtaccgcgttttgtttacgaatcgcttcattttgcttatgattgacgattagtaaatggaaagcgaatcccattacataagcaagtccatagtaggtaaccataatccaatagctattacttggtgcaaccgcatagagaattccagttgttataaaaactgttgttggagctgtccaataataggacaaatgcttactattcgcagcaattagaaacaccgatataagaaatgtcttgttagcttccggaaataaggaggttaaatatatacacagtccaccatatagcagtatttctgtggacaagtaatatttgtaattgaacagtaaggctacccatggaatagagaaggcaacaacctcccaaaaaataataatccaaagtggtagtgtcaaactattctgaaaatctaacgtgattacgacgatagagacactaacaagtatacggactcctaacataatccaatcgtaccaaaaccaatacttaaccatatctaacaagttattcccccccctaagtagcctaccattttacttcctatattataaattaatccttcatacattgttatactttttaattttacactacaattttctcgcaaaagggaaacttctatcgatttagttgccgaatcatgctacgggtatagccaccaattttctttgtcaaacgttctactattctaatacttatggcggtaaatactatacccataaacattacaaagagtgacttggcaaaagtatctatctgtatgaatataatattcatttcaatgtagcgatacagtagtggtgccaacaggaacataagtggcattacataaaaaatgattgtactaatgagactgaaaatgccaatcactaatttctgcattaaccaaaagacagcagaccaagtgcgacgatcagtaagcactaatttcacctgagtccagttcgatgtatctattgttatacttctgtcataagagtctgttgaaatatctgtataaattttcgtctgtatgcgttcgaattgaataaaaggtgtagtagtctgtagtacacgtataattagtggaatcccaattaccgtaaatgaaagggtgaagctgaatagcagagctattagataaaaacaaaaataaaacaaccctgtaacgaaagttagcaataaaaaataaccattctgtatgaatcttgatttcataaagttcatcgctcctatctatataataaccgaatcatactgctttttttgtcattctcactagtgtaaaagtgtcatatgacatttctaaatgatgttaaaaaggggagaacaacctacttctggttaaaaaagatgcgtatattaatctccataaaacaatcccgtttttgcatctgcaagaacgggattgttttgtatttttatttaatatgagagtgacttgtttttcgaatatgaaaaataatatcaaattgctcaagcaatgatttatcaaagtatacagatttgttcggtaagagtcgtgcccctatactgagtaatggtctttttgctttaacccatttctttgctggtcctttaaggtgacgattatctaataaaaacatttcatatggtacttttccgagggtataattgaaactatttacatcttgtggaatcagatccgttataatcttatcttgggtgtcgttgtataaggtgacattcccctccgtagttgtactgccaattgtgacataattattgtctaaacgttccttcaaaaactgccccgaggcataagggtatgattcctcatcgataattcctttagccatatgaatattgtgtgtccacactatcgttttaccacccaatctctcttgtgcccacattgcatgatcggccatgtattgctcatgtagctttaacagacttggaaagtcgttaggaagtagcattgtggtaaatttctctattgcacttgccgttgctttcgcccagatgtactcgggtgaagctatttctgtgttggcttgcccattctcatcttttagtaattgggctactctctcagcgtttgccttgaacttttctcttatttcaggagcaagtttcatatattcctgtaaactgccagtaaaagacggcaattctttataattttcttctacttctgccagcaaatctggtcgatgcacccttacataatcaattactttattaaagcaaccttggtccaactcctttaagtcgagcccaataaattggatcttttttttattggatggatcagcattataatctttcatccactcaaccatggctataatttcatcagtaggatataacaagtttaaaaattctctagggtttccttttcctgtttggatatattcatttagttttaagccgtttccccaatcttcttccattgtgaagtttgtaaaacccatctcagtaaccaaatatttcacaaggcgaaacttcatagtgaaaatttcagagcttccatgagtattctctcctaatcctacatattgtgcgctcccaatcattttcttaagtggttttaaatcctcaaatgattttgacggctctatcgtttttaatggataagcctgtgattgtattgatttaactatatttttttgtattgattgatttgaattttcgactgctactgtttgagcctttcctacttctacacatcctgtgactaataaagctgtactaaccattgcaattattcttttcttattcattttttccacctcaattgaattatttgtaaaagcaagattgattcattgtacttgcacgaatcaattgccttaattcaattgttatctatcccatatcatattttctagttacatattgtcataaagttaattgacacagatcatatgctaatcattacacttttgtactatcggctatgacaacttataaataataattacattgatgagtcgtaagtaagactagattataaatgggggagggattttaaagatgaatgaatttgtatacaaaaatatttttattctaagttgtgtctgtggaaatgacaagaagtatattcgataaacaagtgaattataggggaagggcggattacaatgatattaaacgcaaaatcgttccacaataaagataaaatccaacgtgctaaaataggacttcaactttttctgagtatcttaatcattacttcaattatcctaaatgtagtagtaataattacgaaaagtatgccacttattgtggtatatatgtttaccccagcattatcttctattttgactcgcataatactgaaagaagggtttaaagatgtatcttttagtctcggtaacttaaagatatggaaggggatcggttttgctctgctaatccctatgattatttgtggaattacttattctatcgcctggttgagcggaattgcggggtttcagtatcccgaagttggtatgtttattttagaaccgatctacaatatgcttgggcttcagtatgtaacggcaccattcagcttcatttatctagtagtattgagcggcattttcggaagtttgcttggcttaatcccagctttgggagaagaaatgggttggcgaggttatatgctcacaaggctagtcgatgcagagttttcacggcccatccttattagtggattgatttgggcaacgtggcatgttccaatagttattgctggtctatatgtagcgggaccatctgtcgttctttcagtacttggtatctatctttgtattgtaccattcggttatattatagcttatttacgacttatcacaggcagcatttggccttcggttatcatccatgctacttggaatgccattattcaaggacctttcacacgtgcaagtacagggtatcaaactgagatttggattggagaatctggcttgataaccgctagtattatcttgattactgcaataattacgtctcgaatcgtgaattttactaaatagcatacggatgtgttttaaattcaattagtgaaatatgacgaggcgaaataagatgctcctaaaaatattagaaaaaatctagttgaacagactcttacttcatcttaggctgctggatatgtgggggacatcaagctaagaaaataaacttggttgccataaaaaacataatgttttcatttaaaggctatgagatgaaatttcatcatcttcatcaagtttgaccttcaggaaataaaaagttaaacgattatacaaatactctaactgaaaaaacgatagtccttctacattttagatagaaggactatcgtttatttttttgacaaaattaggaggtgatgttcataaaatggataatataattcgtatttgcgtaaagagaaaaagttttccaaagaagatgtagttaatttccttggtataacggttgattgaaatttcattttataacttgtaaagggctgtgcaatgcatcgtactattgaaaaatctaaatttaatcattaaattgcgataaaatgtggtcggaaataatgaaattttaggaaaaataaggtacactagtttatgattttagttgaaaatcgtttgacgttaatgcatacgggggaaagattgatgaacaacaatacaacaaatgaatcagttgaagaaattgatcaaaaacgagtaagatcaaaaaaacgttatacaaattggaagtttattgcagcgggtattggtgtaattgcacttcttattgggggaatgagttattatcaggcaactcacttcaattcgaatgttacaattaatgacacaaaagttggtggtctgagcgctgatcaggcaatacagaaattaaagacatctggactagcaaacaaagtctatgttgatcaacaacaaattttagatgaaaaagatacaaaaacggaacttacggaaaaagatttgcctcaagttaagaaactattaaaaaaccagtggacatttttcccttcctcaaaggtagaaaattattcattgctaccagagaaggcagatcagtatcgtagtgaaacgttgaaaaaacttgtagaagaaaagctcatctctatgaatgagaaattaaaagcgcctcaagatgctatggcgaagctagaacaagggaaaattgttatttcgaaaagtgttgaaggaaaacagtatgatgttactagtctactgaaagattatgataagcaaaaatataaaagcgaaattcatctgaagtctgcatacataaaacctattaaagaagacgatccgattgtcaaaaaagaggagaaagcactacagaatcttcttgggcagtctgttgagtataaagtgcaggatgaagtttatcctttaaaagcgaaagatttaattcaaaatgcctctatgtcaaaggatatgaaagttacaattgatgcgagtgacattaagaagaaaattactgaaattaataatgccaaatcaacattaaataaagatttctcatttaaaactcattccggttcagtcatatcagtaaaaggagaaggatacggctgggcactagatgttgaaaaagaaactaaacaagttcaacaagcctttgagaaaggcgaaaaatcgctttctgcttctaatattcacgggaatggttgggagaaggaaggcatcggttataaaacaacatcgaataatggcatcggagacacgtatgcagaagtttcaattgcagagcaacaaatttggatttacaaagatggaaaattagttgttacaacaaatgtagtaactggtaaacatagtactggtgaagatacatcaccaggtgtgtggtacgtcctatataaacgaacaccatatacgctaagaggtaacgcagtaggaaaagctgattatgcggttaaagtagattactgggtcccattcacaaatagtggtcaaggattccacgatgccggctggcgcaaagactggggaaataatgcttatttaacaggaggatcaggtgggtgtgtgaaccttcttcctaatgttgcaaaaactgtatatgatagtttgaacacgtatgatccagttattgtgtattaaaaaatagctacgtatcaagaaataaacaaagcaggaaatcttacctgatggtatatgaaaaaacacctcttgcattcgcatactaagtgtgcaaatgcaatggaggtgtttttgtttgaatacaagagcgtattgcttataagaaacaaagtagaaagaaataataagtattcaaatagtcaataaaattgacaatgaatatcattttcacttaatatagaatcattgcatttaattagacatgaattttttgttaatataatagatttctattaagttgtcacatttaagaactatcattaaatattttaagaatttaaacgtaggaaagggtaatataaaatgaactggaaaaaaggcggattatgggttattatttttttcgttgtaaaaggcacgatttctacacttttaatcgttacaggtgctaaatattttgatttatcatttatgcaacttatcttattaattctgaccttattagtgatttctctaataagccgaaaattgctgtatagacataaacaaaacaaaaagcaaaaagagctaaatatataatggagccccagagacctttggatttctggggttttattttgatagttttttcgcatgtatatcaatttaacagaataggttgtccaaaatgataaaatcgatgatgtttaaaatgcgtcagttatttttaataacgattgatacccgtatttctacaatctgtataaatgactcaagcttcgcatcttatgaattccctgaagtgctaaacctaagcaaagtaatgaactatcttaaggaagaaagttgagttagctaatcgcatatattttattgaaaggatgtgattgaattatggaacggccgaattggggaattggaggattagtattcgttggctgtatgtttcttggtggaggagtgggatctatgttaggtaatgcccaaactggatggctaataggaatgggcgctggatttcttggtatggctttaacgagactgttcagaaaataatgtaactgagattcttcttctggtaaataaggaaatatgtaagtaagtcatggcataagagttctataaattatagttagaatcttctcttttgtatttgtcttttctaaatttctccatacatagatataattctcaagtcggaggatggcaccttagggtgtcttttttatgctctttaaaaatgtcttaccattataatagctgagttttgctttcagtctccgatgtccattaagcataaaataaaaattctgcaccatttaaactctgataacaattcatacgatcaagaataattgagttaatagctttcggtagatcgccatcatttttttataatagattagattcattgccgtttcagacctatgtatgaattcataatctaatagtaaaaggaggaatgattaaaggtatggcggttaatgaggaatcaatttgtcaacagtttgcaagaatcattggcggtcaagaaggattcgctggtgggaaatgcgtggcaacaataaaccgagatgaaatacgagcaacaatcttgggaaaacgttttagagtaacaacttccttttcattcgaatcacgagacaataaaactggacgggcattatgcctaggccgagtagcactcttacaaaaagaagtcactgaatttgtggcgacaattattaaacaaggaataatcgtttcgtctatacacaatgagtggttatgtgatgatccaaatttaatttacgttaatatcgaagacgttgatgacccactaaattttgcaagaaaagtgagaagagcgttatgcacgtaatcaatttctttagttaaacgagtgattatattaaattgaaaagttcagcgtgttggatggttttataaaacgaaagaaggcgtttcatatttggaatgccttttctttatgtgttcgttactaatgtgggtggttaactgattatatgctgtttatcttgcaacagcaagaactggacgaggtatctttaaagatgtttgactgtctatagataccatattttatcaaatgttattagcatatcataaaacgataagggagaaatcgccttcataccaaccaatcaaaatcttgaggtactattctttatgttgtaaggttccactattattttcatcaattactcaacgtattgcttcgatgttttctggagtcattttaataaatccttgcttttcatgagataatactttttgatgagtcattttgtgcatggcattgattatatgacgattagaattgaggtcaagtattacctcttcacctttaattctatcagtctgcttttccttaactcctgattatattagcttcaataacatatgatcattcttaagaatgtcattgaaatgtacgaatagatgttagtgcagcaaaataaattgtgttatgatatgaggaaatataaagctatgtaacggagggaataacatgccgcatgttgtgtttcgtggaattactactgaacaattaaaaagcataagcaagccattagtagaagaactcgcagatatctgtgagtgtggtacggataatttcaccttggaattaccaagttctacgtttgtattcaatggagaagaaatagaagcgtttcctcttattgaagtgaaatggttcgagcgtggacaggaaattcgtgatcgatttgccaaggccattactacatatgtaatggattttggacttccagaagtagaggttgtatttacagttttcacagaatcagcgtattatattaacgggaagcattgtgcaagttagagctattagaaagatttttattcctataataaaatatgtttcgttaaaaacaagggccggaattccggctccttttctatcccgcaaaataaagtcttactttatctctccgtctcaaaaaactcaatccactctccatcagggccagcgaagaatatgtaacgtgttccatctggtaatgtttcaatttcttctcctagtaaaaaggttactttttgtttctttagtctttcgatctcatcctctaatgaatccactttaaagcaaatgtgatgtacttttccttctgccggaagagaagagttgtagccttcaatgagttctagtatcgtttcttttgattcttctacacctaaaaaagcgagttttaagtctggattcggatgacccatacgtttcatgagctgtaagccgactacttcttcataaaatgaaatagatgtttctaagtttgcaaccataagtccaacgtgttcaattcttctaactggcatgtagattccttctttctgaaaattatatacaatatattattgaaaattaagaaaataagcaagataaaaaccttacaaattttagcgtgttatatggtatagtgagaaagtatgtttggggagaaggaaggagattatacgatgaatacaactactcaaactccttcattatcggaaacgatgaaagagtggcattatgcattagcgtatgaaattaaacattggaaaacgataggtggtagtaaaattgctatcatgaacggtcgttttttatatacagattatgaaagtacagtatacgtatttcagcttatttcggaagtaagcttacctgaaggttcacccattcgaattgagttcgatggtgaggaagcgacaggggaagtattatctatacatggattagaaatagagctgaaattaaatgattatatacaaggtgaaataagagaagcggttttatatagtgaaccgtggcaattgttagagcaactacaagagcgattgaaagaagcacgtaaagataagctgaaacgtaatcgtataaagcgtcttgttgatgggacgagcagtccgaaacatattgagaagatgaaaaatccaaaaaatgaactggcatatcgttcgttttataatccgacaacgtacgtatggggaccgccgggaacagggaagtcttacaatttatcacgtattatttcggctcattatcaaaaaggaaaatcggtacttgtgttggctcatagtaatgcggcagtagacgtattaatgagtgaagtaacgaagcaaattgagaagaaaaagaaatggacgcctggtgaaattgttcgttacggttatagtcaacatgaacatatacgaaatcatgaaacgttacttgcgtcgaagttagttgaaacgacgaacggatcttggggggaggaaagactctatttagaagagacacgacaagatcttcgtgaaaaaatcttatcgtataaagcaacatctgctgataagaagcgtatacaagagattgaaagtgatcttcgaaagcaaaaggctaaaattaaagaagtagaaaaagaatatattgaaaatgcaaaagtaatcggcgcaactttatcaaaatgtgccattgattcacttatttatgagcgtacatttgatttagttgttgtagatgaagtaagtatggcatatgttccgcaaattgcattagctgcttcacttggaaaacgtatcgtcgtttgcggtgactttttacagttacctccaattgcgatggcaaatcatgaactcgttcgtaaatggcttggggaagatatgttttaccatgctgggattgttgagtctgttaataaatcagaagcacacccaaacctatttatgttgcaggaacaaagacgtatgcatgcggatatatcgaagtttacgaattcgtttatttataaaaatagagtacacgatcatccgtctgtttcagagcgtaaagaacttgcgcaattgcagccgttcgcaaatgaagcgagtgttttatttgatacgagccaaatgggagctttttcgttaaaagatgctgcttctggttcacgttttaacattatgtctggtttagtagcaatgcaaatgatgttaatcggattgttagatggtgtgcaatcaattggtattgtgacaccttacagggcgcagtcacgctttttatcaacgtgtattagagaaatgttgcagagaacgaaatatcaaaacataccagttttagcggcgacagttcataagttccaaggttctgaaagagatatgatgatctttgatacggttgacagttatccgcaagaacgacctggcatattattctttgatcacaaaaaccatcgcctcgtcaatgtagcagtgacaagggcgagagggaagttcattcaattatctgattgccattatatgtgtaaaaacctttcgagaaaacaagcgttatcacaattaacagctcatatagaacgtcacggagatgtgtatgatcgtacgacatcaagacaattgtgggaacggaaaatttcgaaacgtttacgctggtttatggaaatgaatcttgaggaaacgaaaggggtattaaaagatattttagcctcaaaacgaaaaattattatttcacttccaagtacaaaacaagtggataagcgagtatggcaagcgttaatgcgtacaaatgcgcaaataacagtttatagtgatggaccagttccactgaaaaatgtaaagttacaaagacaaaataaagcattcccgtttatcgtaattgatgatgaaatcttctgggcaggcgcaccgcttacatctcaaatgatgtttgaaggtagtacggaatttccgtacgtatgtgcaagactgcaagcacctgagacaattggtgtattaaaaggatttttagatattcggtaaattcggataggaattccttgacttttacttggaatgaacttagaataaaaaataatttaatataattttatgaaaattcttatcacgagaggtggagggactggccctatgatacctcggcagcggattcgttaggaatactgtgccaattccagcaaggtaacttgaaagataagaaagaagctcattttgactgtatatacagaagcctctttctatcttttagaaagaggcttttttatgtgaaaataaaaggaggaagaacaatgggagcgacaggagtagcgtcacaaagaaaaacaattgaagagagtatcgaaagaaataaggaaaagtacatagaaacaagtcatgatattcatgcgaatccggaaattggtaaccaagagttttatgcatctagaacgttaagtttattgctaggcagtgcaggatttcagttgcagcacaatatagctggacatgaaacgggatttatcgcgcgaaaaagctctggaaaacaaggacctgcaatcgcatttctagcggagtacgacgctttaccaggactaggtcatgcgtgtggtcacaatttaattggcacaattagcgttgcagcagcaatcgcattatcagaaacgcttgaagaaattggcggggaagttgtcgtgtttggtacgccagcagaagaaggcgggccaaatggtagcgcgaaatcaagttatgtaaaggcaggtttatttaaagacattgatgcggcgcttatgattcatccgagcggaaagacagcgacaacgagtccttcactagcagtcgatccacttgattttcatttttacggaaaaacagctcacgctgcagcttcgccagaagaagggattaacgcattagatgcggttattcagctctataacggtattaacgcacttcgccaacaacttccgtcagatgtgaaaattcatggcattattactgagggcggaaaagcacctaatattattcctgactatgccgcaacaagattcttcatccgtgcagcaacgcgaaaaagatgtgcagaagtaacagaaaaagtaaaaaatatcgcacagggagcagcattagcaacaggtgcaaaagtaaaaatccatcaatttcaaaatgaaatcgatgaattactcgtaacaaaaacatataacgatatcgtagcggaagaactagaactattaggtgaagatgtaaatcgtaaagaaagagtagggattggttcaaccgacgcaggaaacgtaagtcaagtcgtaccgacaattcatccgtacattaaaatcggaccagatgatttaattgcacatacgaatgaatttagagaagcagcacgttcagaacttggagataaagcattaattacatcggcaaaagcattagcaaatacggcgtatcgattaattacggaagaagggttgttagagaaggtgaaggaggagtttagagaggcgcagaggaatcaggggtaaggggattaaggtgcttttttcgaatagagatctaattcataagtagagatataaaaaagaacattgaaatatcaatgttctttttttgtttactaatcattgatttcattggcttttctcataaaggaaaaacttttactgttagccggggataatacgtatccctttattagaacgacaatttctcctcaaactcactctttaaaacaattaaaggagacgataatccaaattgcattaaagagtctaaaaatgtagcgagagaatccatcgaatcgctcatgaccttcatcatataattaaattccccgctaattcggtataaatctgttacttcaggagcggcattacaaaattgaataaaatcagagcattggctcgttttaaacatgatgaatgcttgaatgtttttattaatttttgcaggctcaaatttcgttcgataagccgctataactccttgatcttcaagcttgttaatacgttcttttacagcaggttgcgtcatggatataattcgtcctatttctgaaacagaaattctcgcattttcatataacaggttcataattttatgatcgatttcatccaattttacagcgttttgcattgtgtagcctccttgttatgttttctaaagtgaattgtaaattataactataatatcataagtgaacgaactaaattacctataaatctatatttaaaatgattagtatttgcatgaaaatataagtatagggtttatcaaaagggaatttaggaaggatggaaaaaatgaagaatcttgatgggaaagtagcattagtaacaggggcaagtcgcggcattggtcgtgcgattgcgatgagattggcaaacgacggtgcattagttgcgattcactacggccgaaataaaatagttgcagatgaaacaattagtgagattgaatctaatggaggaaaggcattcttaattgaagctgatctcaatttaatggatggtgtcaaaaaaatagtagaacaattgaagaatgaattacaaataagagttggtacatcagagattgatattttagtaaacaatgcagggataggtacacaagggacgattgaaaatacgacagaagaagtttttgatgaaattatggccgtaaatattaaggcgccattctttttaattcagcaaacattaccgttactacgagtagaagggcgcgttattaacatttcatcagcggaagtaagacttggttttacagggtccattgcatacggtttaagtaaaggtgcactaaatacgatgacacttcctctagctaaacatcttggagaacgaggtataacagtgaatacaattatgcctggatatacgaagacagatatcaatgcgaaattgctagatgattcagaaatacggaattttgctacggattcatctgtgttcggacgaatagggcaagttgaagatattgcagatgtagtagcattccttgcttcttctgatagccgctgggtaacagggcagattatagatgtctctggagggttttgtttataggggcactactccataaccagcaagctaattaagtaaattactagttatgaaacgatcctcgtttcataactagtaatctatagaaaggtagagatgataaagaaatctattaaaacgtgattttttcgctaggcaatttgaataagggggctatttttaattattcataatctaaaataatccaattttattttacagtaacattaaaacaaaattattgaccgcatggtacaaaaagggtattctattcatattatctttaaaatgagaggaggatacgattgaataaacgcggcagacctcgagagtttgattattcctcaattgtagatgttgcaatgaaaacattttggttaagaggatatgaaggatgttctacacaagatttatgcagtgatacaggacttggaaaaggaagtttatacaatactttcggtagtaaacatgaactgtataaacaagtattagaacgctaccatgaaattgggattagggaacaaaagaaattgttacatactccaattccagttaaagaacgattaagtaatttttttgaatgggcattgaaagaagactttgagaatatggatcaaaaaggatgtttattgattaatgccagtatagaacgtgctaaaaacgatttaatggtacaagaaattttctcgaagcatgttgaacttcttaaacaagctattgaaacagtgatggaggaaggattgcaaacaggtgaaatttcaaagaagcaatcagctgaagaattagctagtctgcttttaagcagttattacggattccgtgttcttaatgtatcgatgcaaaatcggatgttgtctgaacaagttatcaaaggaacagtagagtctatttgtggcgcttagtgcgcccttttttcgcactatttttgtaccgatcattacagtaatggataaggagtgtttttatgccatcgattatttatttattagctttagcaatcttttgtatgactacatcagaatttatggttgcaggtatgatgaatgaacttgctcttgcattccaggtttctgtatcatccattgggtatttaatttcagcttatgcaggagcaatggtaataggaggccccattttaactgcaatcctcttacgaatgcgcagcaaacaagcattattgtttttaatgttcatatttttaattggtcaatcgctcggagctattgcttggaactatgatattatgatgatttcacgtattataactggtattgcttcagcttcagcttttggagttgcgatttccttttctgcgacattggttcactctgattcaaggggaaaagctgcatcaattgtacttgcaggtttaatgttcgcaactgtattaggtttacctataacaaccgttatttcgcaatattttggctggcgtattagttttggggctgtttctgttcttgtgctagtatcagcaattatgattcaacggttgttaccatcctcttcaaataaagagcaattaaattggaaagatgaacttctgcgatttaagaatattcatctttgggcagcgtacgtaacaagtatgttcattattggtggtacgtttgccgcatttagttatttcactcctatctttacaaatgttacagggttttcaagagcaagtattccatatttacttgctctctatggtagcgcgacagtaattgggaatataataattggcaagttcgctgataaatttacaatgaaaatacttatgggtggattaattatattaatcatagcgttgtctttatttgctttaagtgcagagaataaatacattgcagttatttctacgatttttattggtttaactggtgtagcattgaatccagctatggttgcgagggtgatgaagacagctagtaatggaataatgataaataccgttcatagttcttttattacgctaggtattgttattggttcgtcactaggtggtcttgggatcagtaaaggatatggttttgtatctccgctatggattggagcttgtttagctatccttggggtaatttcgttattcccatatttacataaaggaaaggcagattaagatgtttaaaatttctttatatgaggtactgccacattaccatcaagctaatactttcatatccccctaaattaaatttttctttctctacagatagctattctgagaagccgctcattttttcgttttgggggcatttctttttcttaagttgatgggcatagggtaccgccccacaaccatcaacttaaggattaaaactatttttgtaattaaaagcatgttactattctcattaacataagagaatagtaacgtgctttttatgaatatgcaccaaaaacaagagttatatcaatttttctcattttggggtatttgtttttcttagattgatggtgatggggcactactctataatgatcaaattaaaatttaaaatagttatagagactccatttctcggaaatattgtaactattaagttgtaaaaaaagccgtagtttttcatttttgaaaaggctggggtcctttttagttgtagcaaagatataatgggaggaagtttttctaaatcacaaaaaattgattaataagttgtataataaactcaatagcgtatatactataagcatcaaaaaaagttgatgaagggaagtgaactacagtgacacaagattttaagttatatgagaaaaagtttaaagcgttggctgatcagaagcgtttagagattatgtatgaactttgccagcgaggccagacttgcgtatgtgatttaacagagatttttgaaatgacgcaatctaagttgtcatatcatttaaagattttattagatgcaggtttaattgtaaaagaaacaaaaggcacgtggagttattatgatctaaatgatgcggaagtaaataatttattatcagaagaattatgttgtatctttagaaaaacaggaaagggtagctgttgttaaaattttgcactattaatcaaaaaaaattgattaataacatataaagaggaggaataagctatgatatatgttcacgttggtataaacgttacgaatttagagaagtctattgaattttacgaaaaggtatttggtgtgtcaccagttaaggtgaaagtagattatgcaaaatttttattagagacgccaggacttaatttcacgctaaacgtacgagatgaagtgaatggaaatcaagtaaatcactttggttttcaagtggatacagctgaagaaattacattacataaagaacgattagaaaaagaaggtttctttgcgcgtgatgagatggatacgacttgttgctatgcagtacaagataagttttgggtaacggatcccgatggtaatgagtgggagttcttttatacaaaagcagatagtgatgttcacaaaatagaagatccatcttgttgtacgacttctaaagtagtagaaaaaaattcttgttgttaataggagctggaaaataaaatgaaacgtttatcttttctagaccgctatttaacactatggatctttctagcgatggctgttgggattggtttagggtttgtgtttcctagtgtagtagacggactacatacattacaagttggaacgacgtctattccacttgctgttggtttaattgtaatgatgtatccaccattagcgaaagttcgctatgaggaaatgggccgagtatttaaagatgtaaaagtgttagttctatctttagtacaaaactggattatcggtccggtacttatgtttgtgttagcaattatttttcttcctgataaaccagaatacatggttggtctcattatgattggattagcacgttgtattgcaatggttattgtttggaacgatcttgctgatggggataaagagtatgcggcaggtttagttgcttttaattcggtattccaaatgctttttttctcagtttatgcatacgtatttgtaactgtaattccagaatggttagggattgaaggggctattgtcgatattacaatgatagaagtagcaaaatcagtatttatctatttgggaattccttttatagcaggtatgttgacacgctttgtactagttaagttaaaaggaagacagtggtatgaaaaggtgtttatacctaaaattagtccacttacattacttgcattgctatttacgatcgtcattatgttttctttaaaaggagagatgattgttagcgtgccactagatgtggtaagaatagcgattccgttattaatctattttattgtaatgttttttgtatctttctttatgggaagaaaaattggtgcaaactatccggtgacgacaacgttagcatttacagcaggtagtaataactttgagttagcaattgctgtagcagttggggtgtttggtattcattcaggcgcagcatttgcagcagttatcggaccattagttgaagtacctgtaatgattgcacttgtaaacgtcgctttttggtttaagcgtaaatattttaatgatcaaccagcataatttaaaaacaaaggcggaaaacaacatggaaaacaaaaagacaatctatttcttatgcacaggaaattcatgccgaagccaaatggcagaagcatggggcaaacaatatttaggtgataaatggaatgtatattctgcaggaattgaagcacatggagtaaatccaaatgcaattaaagcaatgaacgaagtaaatatcgacataacaaatcaaacatcagatataattgatgcaaacattttaaatagtgctgatttagtcgttacgctgtgtagtcatgcggattctgtttgtccatctactccgccgcatgtaaatcgtgttcattggggatttgatgatccagcaggaaaagagtggtccgaatttcaacgtgttcgtgatgaaattggtgaacgtataaagcgattttctgaaacaggggagtaaataaaggaaagagtcaatcttctatcttataggggattggctcttttttattatgtatttcatttacttatcgcatcgctttaaaaccactcttgaaaataatacagaatattatgtgaaagtggtaaagttagaatagaacagtttaaaaaaggggatgtaacgtatgatctgtgaactaagcaagaatgatttttataggtgtaatagtttagtgaatgaacaaggtcaattagaggtacgtgctgtaattgcaggagtgaaccctggtcgtatatttgtagataatagtactgctcctaattcgggacttatttggttaggtaataatgatggattcttcttcattggagattctgcaaatgaagagtttaataaagaaatgaatcattttattaataatgtaatagtacctgaggcgaggaaggtaggactagattgctttgaaggaatcggtaatcattcaaaatggaacaaaacaattgaaagaatatttcagcaccgtaaattaaagagttggaatcaaagagtgtatacgctaagaaaagaggattatgacaatcatcatgagcctaaatttgaacagggatatactgtgctgaaaatgagtaaagctctctatgaaaataataacaatacatttaagaatattgattttttacaatcaaaaattttagagttttggtcttcaccggattgttttttcgatgagggaatcggttattgcgttgtttatgatgatctaattgtaagtgtatgtttttcaggttttgtatttgcaaatatccattgtatagatattgaaacgataaaaggtcaccaagggagaaaattagctcaaaagatagcgcatagttttgtgaaagattgtttggagaatgatattattccatattgggactgtatggaattgaacaagccttctgttgcagttgtggaaaatgtagggtttacaaatgtatttaactatgtgggatattattttttatttgaataatctaggtatactttacaatttacactttgaggttgcccaatcattatatatatctacaatttaaaaaagaaagcatatgaggtgtccgaaaatgaaaatacaaatagtattgtttgatggtttcggagaacttgtctctttcgcaccgtttgaggtactgaaaagagcgatagaagaaggggctccatttacaattgaattcgtttcgagtgaacaaaaacaagaagttacgacttcatttggagttacggttaaactacatgattttttacgaatggataataggccagatttgttaattgtacctggtggtggctggaatcataaagcagagcatggggcacgaaagcaagcagagcttggtactttgaccgaaatgattagcgagatgcacaatgcaggaacaattgttgctggtgtgtgtacaggaggtatgctattagctgcctctggtatattgaacggtcgaaaggcaacgatgcactatttggcacaggatgaaatgagtgaatacggggcagagcttcttcattacagaattgcggatcaaggggatattatcactgcaagaggagttacttcaggagttgatttgggactttggatcacggaaagattcgcaagccctaaaattgcggctgccgttgaatacagaatggaatatgagaggcgaggtgttgtttggaagtaatttgacttcttttttatcccgcattaacgggcagtaagactcccaccacaaaattcaacgaatgggagggctgcccgtaaaaaaacaatggatatgtactaataatcagtgggggtgacaaaattcctactgattaaagtttcattttataatttttcaccttattaaaagttgatttgttagaaaggataatcatttattgatataatgaatggatgcgtggcaggaaatagatagaaagatactgctagtaatttatacttaaaatgtagggagattgaacagagttatggggacagaaaaagaaattagttccgctaaattaatatggaagatgacgcgcccgcatacattaacggcgacgttttctcctgtaattttaggaacagtggcatcactttatgttgccaaaattgattggctgttatttattgcgatgatggttgcatgtttagcattgcaaatagcaacgaacttatttaatgagtactatgattttaaacgtggattagacactgctgaatccgttggcatcggtggcggaattgtccgtcatggattgaagccaaaaaatgttttaacagttgcgcttttattgtatgtcgtagcagcttttattggcatttatatttgtatgaatagtagttggtggttagtggttattggtttaattgggatggcagttggctatttatatacaggtggtccactaccaattgcgtacaccccgtttggagaattagtttctggattgttaatggggacatgttttgtactcattgctttctttattcaaacgaatacgataacgattgaaagtgtattgatttccattccaattggaattttagtcggtgcaatcaatatgtcgaataacatcagagatatcgaagaagatattaaaggtggaagaaagacattagtaatcctccttgggagagagaaagctgtggtaacactagcggtagcctttttcattgcgtatttatggattgccgtaattgtattaatgggttatataagcccttgggcattagttatgttcctaggtttgagaaagccgatttctgcgattcaaagtttccaaaaaggggcaaaggatcctgggtatatgcgcatcgcaatgaaatcaacagcgatgacaaatacgatttttggcttcttattatcagcagggttattaattagttatttgttttaaataaaaaatatggttaaataacttaaccccagtttctcaattttaatatagagaaattggggtttttattttgactttgtttaatgttaaaaacagtttcatttgaaatgcaaataccaataaattgcaacttcatcattttcaatatccaaacctttataaacaagaaaatcacacccaccaattacaaatccgcatttttcatagaacttacatgctgcgacattattattttgcgtttcaagcatgatacctggcatattgcctttttttgcccactgctttgcttgatcaactaatcttttaccaactccgagtgtacgatattttttatctaccgttatatcttctatgtaagcatagtggttccaattctttttcaataccattaatccaatgatttggttatgtaacagtgctatgtaaatgacttgattaggtttatttatatattcattgtaagccagttcttcattatcatcttgattttgtaaataacttttttcataactcggaacgtcttctactgtatattctatacgtttatttcctttggaaagagaaagaattaaccgagcattcactataaaactgtcatcaatctccgggagattatctaaatcatttgtttctaactctctaattacaaggttcatcggggcacctccacataataatatttcttctagttcttcatttggttcaaatgaattccaattacaaaattataatagaatttcaatagtacggctatctttgtattttatctttataccagcatgttgttatcttgatatgaaaatattgtttagaaagagtagtatcttttattttggatgtatatccagttttcaaatttaactgtagtagagaaacaaatatttttttaaagagtggatgccatacgttattctttaactaaattcgacattatctgcattttatcttcaccttcctctattaatctatttattgtaaacatcagctggagttaatgctcagctgtataaataatgaatataaaaattaatagggaaaggatcgaaaaataatgaaagaatcacaaagtaagaaaaaaacaagtcgactaactaaggtaataatatctctaggagttgttttagcaacgacctttttcaccttctttttaataggaaaatggaactctatcccagcgaagggaatagctaacgaaagtagtaatcaagttaacacgcaacaacaagaaaagaaaaaagaaacaccaccagcaaaacagaaaagacctgatggaaaaccggtgggaaaggttgtttatttaacattcgatgatggtcctagcgaactaactgggaaatttttagatgtactaaaagagcaaaatgtcgcctcgacattttttatgcaaggtagcaatttacaaaatacaggttttcaggaaaacgtaaagcgagcagtaaaagaagggcattatattggtgcacatagtatgacacataatagtgataagctatacaaaaaaggacaatttgtaacggagatgaaagaaacgttagctcttattcataatattacgggtacaactcctaaattagttcgtccgccatatggatctgcaccaggattaaagggcgaggaaattcgtaaccaaattgtagaagcagcaataaaagtttgggattggacaatagactcaaatgattggaaattaaaagataatccaactcagattatcgataatgtaaagaaacagacaacagaagaagtagaagttgttttaatgcatgaaaaggcgcaaacattacaagctcttcctgaaattattaaattttataaagagaaagggtatgaatttggtgtatataatgacgaggatcattttcgtctaaacttccaaaaagatcaacgtctatagtataaacatagttattttaaaaggtgtttttattactaaatcaataattaagcaaaagtcgatttcctattttataaagaaatcgactctttcgtttatgtattatgtcacaagagtttccttattttctccggaatgtcctttttagaaatctatgcaacagagcctttatagtaagagtatcttgttgggaatgatcaaaaaaatctatattgtaatataaaaaatcgctatgatatgaaaggataccatacaacaatcccaataaattcttctcaataattgaaaataaaatcaatccggattattatattgttattgtaaatttattttattgaaggaggatacatagatgaaaagctcaaaaggctctattgaatcagagataagcaaagcaattactcactgggaaaaggactacctaggacgcgggtctatatccgttaagacagatatattacgggatatgattatcgtaaatttacaaggtgttttaacgccggctgaatatagtgtttgcgaaacaaaagacgggatgctaacgataaagaagaatcgttcggagctagttgaatctggaattgatgatctgaaagagattatactagaattaactggagagaaagtgaaaagctttcatacggatataagctcccgtacaggtgaacgagtaatgatttttaaattgcttcataatcttgaggagaaattttaaaaataccttaaggttagtggaaggattaagaaacctacaagttttacactttattaacaggctaataattaaaaacttgaagttatttaggtataataaatcttaattctgataactcttaaaaaacggataaagaaattgacaaactgcttaatatggtttatcttataattgttttaaaaaattgatagatgctcattttaacagtttgctataattaaggctttagcatttttttaatatgtaatattgactaaatgaaaaagtttcttaattaaaagatagcgtataacataaattgatatattgattgcataatctaggagatcagaaatatacatttctttttaataggagtaatacatacattattatcctctataaaatgggagctcttcaaaaaactttattgaagttagttgaagggaaaccgacaatctccataattcaatgatgatataaaatcattgaattatggaagttgtcggttttttttatgggaaaaaacgatgcactaaaaagagtgaatgaaaattgaaatttaaaaaactatcgtaattaaaaggaatttttataggttattttcgcttagaagggagtatttaacatgttaatttcgctgagttcatcaacactgttaactttattttttatggcgcttagtgcttcttggctaagtggattattgtttttacatgcaaggatacctttacgttttgttcatatccatattggtatcgctgctttaccttcattggtttctttgctcgcacttgttaataacaatggagatagagttgtggggccttggcatctagatactttagcttggttaatggctttctttgttcttacaattggtttaatcattcagcgtttttctgtacgttacttaatgggagatcgctcatatcgaaaatactttgtactttttacatttactacaggtgtatcttcggttgcatggttaagtgatgatcttcgtttcatgattatttgttggggagcaacgcttataggattggttctactcatagggctaaataaagggtggaaagtagttagtgaagcaactaaaatctctggctatttatttacaataagttggattgcattgctatcagctatcatttggctttttcaagtaactggacagtggcaattaacatcagttttaacgaatgaaaatgtagcgctacatggaacattggagagaacaggaattaacttattaattatattagcggtgatgattccagcagcacaatggccttttcaaagatggttaattgagtccgctgttgctccaactcctgtttctgctattatgcatgcgggtttagtaaatgctggcggtatcatgttaactagattttcacctctttttcatgatgatattgcacaaataattttactaattttctctagtatttctgtcttgataggtacaggaattagtttagtccaagttgattataaacgtcagctagtaggttcaactattgcacaaatgggatttatgcttattcaatgtgcattaggcgcctatttagcggctgttattcatttaattttacatggtttgtttaaagctacactgtttttacaagctggttcttcagtgcaacgttttggggtagtgaatcagtctaatgaaaagatgtccaatttatggattagagtcgggcgtgttttaggattatttatagcaattactttctggtttatgacttctggagaggggtatcaactagttagtgcgttaatcttaggctggtcactatacttttcatggaaacagcttgttgtttttggagagggaagaatgggacgaattgctggcgtaattgttttgattggattttctctcatttactttaccgttcataattctctttataaatggttgcatactgatatttatcaaagtgttcaaccttcagctccagccgttatctttgttatatgtattttactatttagtagtgttactagtactttcgttactcgtcatcaatcttctactttattcgctgtactttatctttggttagttcgagtaggtgaggcgagaagaaaatcagtagaaagtcacccaagctatctgaaacattatgtatcaaagggaggtaattcgtgatgagcatatcgtcaatattaaagaaagatacaaacattgatatgcaagaaaataatataaatgatttagttgcatctgctagccgagttattgcaccactttggcctatctctacgtttgcagctcaccacccttggatgggacttgaaaagcaatcatttgaacaagtcgcaaattggctaaaagaagctcgtaatgtggatatgtatcctagtacttccatgattcattcggcaaaagcgaaaggtgagattgaggaatcatttttacaaagtagtttgtctcgttggctggattcacaatcttttcatattccgcgagagaaagtagagcgattttgccaagcggctttaaagttagaaaaattaccttctagtctattatcatcgccagaattaaataaattggcagaagaaatgagttatataaatacagcaaatatgaaagcctctgttatgcagccaataagttcgcttatagagaatcaaaatagtgaaaacctatctgatattcttaattatcatatcattaaatggtgtaaattatatcttgatgactccggatcaagttggacgatgccaaatcgagagaaaggtttttatcgtgcatggcaacaccttattacatttgatccagcgctcagtaaaaatgagcgtaaagttttaaaagattggccacaagatgccgaagtagctttagcgagagcgttatttgaactaggaatttctgaatctaacatacaagcttatcttgaagggcacttactttctttacctgggtgggcaggaatgatacgatggcgctcacaacaatcaattcaggaacaggggcttttaatagaatatttagcagttcgaatttctatggagctggctattgcaaaaccttatttatctttaaaaaatcaaaaggttgagaaaaaagtttcgatcgtcccacttatagcttcttggatctattgggggaatatttcaacacgggaatggtcacaaatgtctgcagctgaacaaagcgaattgttagcatttgcatatcgttttgatgaaaatattcgcaggaaactttggctggaagcttgggaacaaacgcatgcagagcaattaagagagaagattgcttctaaacaacgcgcaaccaatgataaaaagcgtgtattagctcaattagcattttgtattgatgtacgttcagaaccgtttcgtcgccacttagaaaaactaggtccgtttgaaacgtttggaatagctggtttctttgggttaccaattgcgactagtgaactaggtagtaatgacagccatccttccttgccagttatactgaaaccgaagcatcaaataaaagagcttacagatgaaaatgaatttaaatcttatgagcaacgtaagagggtaggcagttcggtgcgttatacatttaaaacgatgaaacagaacgtactgacaagtatggcgctacctgagttaagtggtcctttacttggtctacagatggtgacaagaagctttgtcccaagaggagttggtggtttcattcgtaaacttcgtaaaactatgttacaaaaacctgatacaacattctcgcttaatcatgttcatgacacaaaaggtgagatacctatcggttttacgaaagaagaaaaagtgaactatgtgcgtcaagctttaaaaatggtgggactgacagaaaaatttgctcctttagttgtaatgtgcggacatagtagtcaaagtacgaacaacccttatgctgcagcacttgagtgtggtgcttgtggcggagcagcaggaggattcaatgcaagagtttttgcgactttatgtaatcttccagaagtgagagaggcgttgtttgctgaaggcattaacattcctaaggataccatttttgcagcagctgaacataaaacaacagtggacgaattggaatggatttacgtcccagaactttcgaaaactgcgcaagaagcgtttgattgtatcgagacgattatgccaaatgtgagccaacatgcaaatagagaacgtttaacgcaattacctaattttaaaacgaaaataaaaaatccgagtaaagaggcacatcgatttgcagaagattggagtgaaatacgtccagaatggggattagcgcgtaatgcatcttttattatcggacagcgtgaattaactcaagattgtgacttagaaggcagggctttccttcataattatgattggaaacaggatgaaagtggcgatatattagctaacattattgcaggaccaggaacagttgcacagtggataaatctacaatattacgcatcaactgtagctcctcattattatggtagtggaaataaaacaacccaaaccgtaacggcgggtctcggtgttatgcaagggaatgctagtgacctgttgccaggcttaccttggcaatcggttatgcagtcagatagtgagacgtatcattcaccacttcgtttactaattgtcattcaagcacctattgaatatatagaacgtttgttaaataatgatttcacatttcgagaaaaagttcaaaatggatgggttagacttgcaagtgttgatccagagggaagctggaaaaactggtaacaattattattgttactagcttaaaagtttcataaatacaataatgaagaaggagtgctccatatgaattcaaagaataaaaaagttttattattaacagacattgaacacggaatagagcctagtatccaacaagtaactaacattcaacaagaaaacatgttgactatacacagctatgattctgtaattgtacatccttatggagatataatgagatctattattattgctatttatcaagaaaatgttaaagaaatttttgttgtcggaatagaggataaagaaacttcttcagttaatctacaaactcaacgtgatttcataaaagataatatagaattagactatctctttaaaaattgcatgcctgaattttcaagtggtagccttaatcaatggctgagtgcacaaaaaaatgttagtgaaaatattgaaaagagtatagatatgatccgtcatcatccattagtaccttctgatattgaagttcatggtttcataattgatagaacgggtgaaaaagaaacggttgttaaagtttttgctaataaagtactgaaacaaatgcattcttatgtgtaagttatcgatagataagcaacttttatttggacttgtgtcctttacaaagagcaaaagaaatcttctataaatggggatcttttgctctttttgtttgaatttttaatgtgttttataggagatacctaatatgtacataataaaaatatataactttttgcataaaattttaaggacggattagcaggtgataataaagttaatcgtaaaatagaagtgtatattgtgattgatcccgcattaacgggcagccctattggtgagggctgattaaagtttcactttattttaagattattactaaaaagaatggagattctttaattatgagaataaaacagttaaaacctaaagtgatatggaaaaaaagaatgttgctaactctttttattgttttcggattgattattgcgggggttgttttttggaatgtttcacctattccgaaagcgtttctcataaaaaaagcatttgaaggtggaatgtttgttcaatctaataattataaaaacgctctaaaagagacacgaattgttaaagatatcaattataattctaaatttcctgatggtacattagacattatttatcccaaaaattttatagggaaaacacctgttattttttgggtgcacgggggtggatttgtaggtggagataaatcagacattactggttatgcagtagaattagctgctcgtggttatacagtgataaatataaattatgctcttgctcctaaaagaaagtatcctacaccagtactacaacttggtgaggcttatgaatatataaaagcaaatgcaaagaaatataatgtaaaactagatgacctatattttgcaggagattctgcgggagcgcaaatatctggacaatttgttactattcaaacatctccagattatgcgaaattaaccgggattgacgctgttgttgctccttctacaattaaaggtatattgctattttgcggcccgtataatatgcctgcattagctaaaatggaaacatccaaagaagtgcaagactttatgcgtactactggctgggcttactttgggaaaaagaaatttgaaacattacctgaaatggaaatcgcctctatttataaacacgttacaaaagattacccaccaacgttcatcacagatggaaatactgcatcatttgaagagcaaggtaaagcattagcttctactttacaaaataaaggagtacctgtagatacacttttctttgataaaaatatctctggcgagttagcacatgaatttcaatttaaaatgaacactccagcaggtgaagaagcttttaaccaagttcttaaatttctaaatgaaaataaataatatatatactattaactttttataagcctagtttaataccatataggggtgaacaaaatattgcattaataatctaatggtagcaaaaataaatttgataagaagtatatagtaagaatgatttggagatacagatggggatataactattttatttaggacggtgcactttaaatggatttacagaaagggaaattatattggaacacaactttttctaatacatcttcttatcctcgcttggaagaagatataaaatgtgacgtactaataataggagcaggaagttcaggtgctcaatcagcatactatttgagtgaatcagatttaaatattgttgtcgttgataaaagaaaggtaggacacgggagtaaccttacaaatacagcacttattcaatatttaggtgacaagatgttttttgaacttgtaaatacatttggagaagagtatgcagttaagcatatgaaattatgtgaacaagctattaatgatattgaatatgctgatcaaaacttgccttattgctctgattttaaacgacgtgacagtttatattatgcaagttatgaagaggatataaagaaattagaaaaagaactgtattatttacataagcatgattttaaagcgacttggctatcagaggaacaaattggacagagatatccatttaaaaaacgtgcagctatttatacgtataatgatggtgaaataaatccttataaatttacacatagtttattagaacaagctgctaataaaggagttcaaatttatgaagatacagagattgttggcaaaaagttagagaaagaatgtgctatcttttatacaaaggggggcaattctattactgccaataaagtaattgtggctgcaggatatgaagggttggaatttaaaaaggaaaagaacgctacactgattagctcatatgcagttgttactaatcctgtagaagatttatcttcttggtataaacgtactctcatttgggaaactgcgagaccatatatttatatgagaactactgcagataacaggattattataggtgggttagatgaagatacaaacattgctcaagaaagagattcaaaattaatccataaaaaagagaaattagtaaatgaatttaataagctctttcccaatataacagttgaacctgaattttatttaagtgctttttatggtggtactcatgatggtttacctataattggaatgtatgaagagtttccaaattgtcactttatctatgcgtatggagataatggattagtatatagtatggtgctttctaaaattgttcgagatataattattagcggttcaagtccggatttgaatttatatttacaaactagaccaaaactaaatgagtaagctacatgtatgcaaaatcatagtagtaacgagtttatttagggttccattgtaaaaaaacgctattttaaatgtattagtttaatgtgactatttgttatgtttatgaatgcttaaataaagcatttataaacaatattatttgttaaacccattcatcttactaatttctgttatttgtataatccattctttttttaggtagggtagagttgcttggatatgatgatattcccattcttcctcaatggtaggataaaggttaaataagtatttttcttcatcatttgttacacttgctttaggattgccagtgagtttaaaataaatgtcgcaccatccgctatagtttgttaacataaataaaaaattaggacatgtgaattcgatgaggtatatttctttctctaattgaatatctgatagtaattcccttgcagtctcaaaagtaggcttctttttgtaaccattgcatgaatgccatgcccaaatggggaaatctatagtaaagtcaatacctttctgtttcatgtgtcttacaatgtatttatatgctgtgaaatcttctttactaacaaaaataggattggctataagcttaccttcattcaaaagtgtatttatagcatttttgttttgaaaagtccataggattgttgaatcaataaatgtatttaagtttgattgtttatcaaattgttttttcatctttcgctccattttcttttttattttgcagaattaagaataaatatgactaatcggataataagaaatacctatgctagatacaattgtaaatgcttatttaaagtaacagcaaggaataacctttgtatatagagtgtacaatacatgcaaaacaggattaaagaagattttaaatataatatgaaatagtacaaaataagaatttgatacatcttttatatataaactattaattgaagtttgtaattacacattatagttagtatactaactatataattagtgtactaactatattggaggttatatgaataatttaggctatttattacacaaggtaagtataatgacgaaaacagaattatcaaatcaattaaaagaatataaaataacagctcagcaatggtctgtgttaaaggatatatctctttatccaaatggaaccaccccggctatgattgctgaaaggctcttagcagaccgtccaacagtaaccggaattatacaaagattattgcaaaaagaatggattcttataaaacataatcctaaagataaacggtcacatttaatatttttaacagatgaaactaaggcattaatacaggagatagaaaatgtaagcgatgaagttataaaaaatgctacagctagtattcctaaagaggaagtagaaaatacagttcgagttttgcaaagtatgattcaaaatttacaaaaaaataaagggtgattaaaatgattttagtaacaggtgctacagggaatgtaggaaaagaggttgtaaaatgcctaataaaaagaaatgctactttcaaagtcacaacgcgcagtagagaaactgaaggagtgtattttgattttgaaaacccctcatctgtaaaggcggctttaacaggtgttactaaagtctttctaataagaccaccacatctagctgatgcaaaaaagtatttccagcctgttgtagatgccgcaaaagaaataggtataaaacacattgtatttttatctttattaggtgtagaaaaaaatccgatagtacctcatgctaaaattgaagctatgataaaggcttctgggatcccttacacattcctaagaccgagtttttttatgcaaaatttattatcacaacatggtgatgaattaagaaatgaaaaaataattgaagtacctgctggtaaaggggaaacaagttttatagatgtacgggatattggagaagttgcagctaaaatattaaccgaagagggacatgaatttaaagcttattctttaacgggaaatgaggcattaacatattatgaagttgctgctattatttcaaaaataataaataaagatattacttatacaaatccaagtatatttaaatttagaaaaagaatgattcaaaagggacttaacagtgactttatttgggttatgattggaatatatacaactgcaaaattagggttagctaaaaaagtcacatcagatttatcgaatttactagatagaagtccaataactatggaaacgtttgtttacgattacaaagaattattaatataataatgcaaaagtaaaaaagaggattattcacataaagaatctattatgttttaagagtaagaggggatagccatgcaaaacaaaattatcgttatgtttcaaaaagattttcgtttatatgataacccagctctatttgaggctgttcagtccggggaggttcttccggtatatgtacaagatgaaactttttcaataggaagtgcggcaaagtggtggttacaccatgctataatagatgtccaaaagcaacttaaggcattgggctctactttaataatccgcaaaggaaatacacaggaagaaatactttctctcataaaacaattagatataacggctgtatattggaatagttgttatgatccagacaggttaaaatctaatcaaaaaatgaaaatgatattagaagataaaggtattatttgtaaggaatttaattcgcatttattattagaaccgtggattataaaaaagaaggataacactgaatataaggtgtttacgcctttttacaatgcatttcaaaagcaggtaatacctaaacctattaacagagtgcagagtataaagtggggaaactctttaccagcaagcttatctgtctcagaattacacttgttgccgactataccgtggacatctcatatggaagcaatatgggagcctacagaggaaggggcatacaaaacatttaagaaatttttctctagtaaattagcctcttatagtgaaggaagagattttccaaatcaaaatgtccattcgatgttggcaccgtatctttcatttggacaaatatcagtaaagctaatgtttcattacttaataaataaaagtactgaaagacaatctagtctctttgaaaaacaagttaatagctttatacgtcaattaatttggcgagagttttcttattatttactataccattatccatttacagtatataaacctcttaataagagctttgaacattttccgtggaataaggaagaggagttattaagagtatggcagaagggtgaaactggttatccgtttattgatgcgggaatgcgagaactatggcaaaccggttttatgcataatcgggcaagaatggctgtagcctcttttcttgtaaagcatttgttaattccgtggcaagaaggtgcaaaatggtttatggatacactactagatgctgatattgcaaataatacaatgggatggcaatgggttgctggaagtggagcagatgcatcaccgtactttcgtatttttaatcctatcacacaaggagaaaagtttgataaaaatggagagtatataagaagatgggtaccagaattaagagatatcccaaacaaatatatacataaaccttgggaagcacctgagcatattttacaaaaatccaatataaaacttgggaatacatacccttatccgattgttgatcataaggcagcacgagagagagccctttgtgcatataaaagtatgaaagaatttatataaaatacacgagtcaatatgaatttgatatgtaaaagttataatgtctatttgcgtattaaagttgtattcattgaaagagtatacgaatcatatagagtttctaaaaccttctattaaaaaggagaatgtttatgaaaaaatctagtattatagtatttttactaacatatggtttgttttatgtttctagtgttttattccctattgatcgtacttggtatgatgcgttagaaaagccgtcttggacacctcctggtatgacaatcggaatgatatgggctgtattatttggacttattgcattatcagtagcaattatttacaacaactatggatttaagccaaaaacattttggtttttattccttttaaattatatattcaatcaagcgttcagctattttcaatttagccaaaagaatttgtttttagcaacaatagattgtttactagtcgctattactacgttgcttctcatagcggtttcttccaatttatctaaagtatcgacatggttgctaattccatattttttatggactgcatttgctacatatttatcttggaccatttatagtataaattaaaggcgtaaataaaaacttgagcataataaaaatgctcgagtttttatgtgtgttaatgataatccgaaatatggaatatatacatcttatggaggtcatctttgtgaagaaatggataaaaattacgctgtactctttactagctattttaattataggaagtattacttttttgacttggtctcagtttacttataaaccgacgcaagaggctttgtcgttagtagatgataaaaaagatgaagataatatcgtttttggagcgaaagatgcgaaagtaggggttattttttatcaaggagctaaagtagaagctgaggcttatagttacttaggagaagctcttgcaaaagatgggcactttgtagtaatgcctcagttaccattaaatttagcgatacttggaataaatgaggtagacagtgtaattgaaaagtatccggaagttcaaaaatggtatgttgcagggcattcaatgggaggagctatgatttctaagtatgcctttcaacatgaagacaaggtagacggaatcattttcttaggttcgtatcctgcagatgacttctctacgaaatcgattccgatgttatcaatttatggggaagtagatgctttagcaactgtagaaaaaatagaaaacaataaaaagttcatgtccaaaaatacaactatgcacatgataaaagggggcaatcatgctcattttggtatgtatggtgagcaaaaaggtgataatgcgagtttaattacgccaaaagcacaacgagatgaaacagtaaaagtaattgagcaatggttattggaacaatgataacgaatttaataaatctaccgaaagaattatccaaacggtagatgggagagagaataaagagccaaatcgtatgaattggctcttttatttatttgctatctccaattgtacccttattttctccggaatgtccttttcagaaataacgtcgtaagaatagacatactttccttttacatgaatttttaagtaagtttttcttctaaaatcattaggcgtgttcgttccaattttatattctttttcattgcttaattcatcaacaccttttagtgagtacatagctcttcctttatgatgataatctggaacaccatatcctttcgcaacggcatatacatttttttcttcagcaatcggattaaatctgtctaaatctccacgtaatatgaaaggtagtaagtatatagggaggcctattcctagtataaaaattacaaatttcttcatgaacgtttctccttttgttaaattacttatttttaagtataggaaaaaattcttatgaatttagaagtgaatttcttaagtttttcttaaataggtgtttaaaggagggataacattgtatggttattctttcgtgcaaatcgtattattttttatttatatcttcgtggcttttatgcaaaacacaacatttctagatgaaattagatctccttatatatattagaaaatgtattttgtgaattaattatgaatatattttattttaaaaaacatcccttgataaatacacagagttattgtaaagtgatgataattaaaatgtatattgtgtgaaaacgataaaaggaaagagtaaaagtagtttttcttttagagagtcggtcggtggtgtaaaccgaagatggggaaataaaccaaattaggttcaaagatggttcgtatgctgacattatttttatggctctttatataaaaataccgagtaaccactcattctaaggatgagtggttacttgcagtttgtttaaatagagaaatattgctaccaaggaagcaagtttatatatgcggttctcttccttttatggaagctagtattaaaattttgtataaatgggaagtaccaaaggaattgattcattatgaatcgtttagccctgttgcaattataggtgattaactaataccggataggattataatcataataatgtaaataaatagttttttgcgatatttcaatagtgaagtatcgtttttcattgtataactaaagcccagctatggattctgatgtaatgttgaaaaatgatcccaagtaatgatttgtctgttgcaatactaagtaactatgacgaatttgaatctaaaaagtatgctaataaaatagcggaatttttttaaaaaaaagtaaaaaacaatagagcttagatttgcaatgataaatgttttttcattagataattactttaccgataatcgagatgtttgcggatacatttattttttggatacataattatatttagagaatacccagttacagtatttgaatttttaataagaagggatgcgaaggaatgaactcacagagacaaggctatgtaggctggtggcaaggcgggcacggtggtggttggccgggtggacacggtggttggcaaggcggacacggtggttggcaaggtggacatggtggttggcaaggtggacatggtggttggcaaggcggacacggtggttggccgggtggacacggtggttggcaaggcggacatagtggttggcaaggtggacacggtggttggcaaggcggacacggtggttggcaaggcggacacggtggttggcaaggtggacacggtggctggcaaagtgggcatggatattaaaaagaggctataaaatcattttttatgcaaagtttgtatatttagtatcgttgtatattttcatttgtatagtaagtatatagtgaaaacagcaaaaaattctgtgaagtaagaattccatccgaaaaattaaagcagcagaaatgtcaaaagaacaaaagacatcgctttttattattcaaggtgaaagagactatcaagttcaatcgaaaatcgaaatctctctatggaaagaacaattaaaagaacgagataacattgattatcgactatatccaaagttaaatcatttctttacagaaggggatggagaaataagtaaaccggatgaatattatagtcctgctaatattcttgagtatgttataaatgatattgctgcttgggtgcaaggaagatcgcaattaaattagcaactatatgttttaataaagactttctttctgtaattaaactagaaacattattagggtatatgttttttagcactcttttaaaaagagtgtttttttattttcctttgatttaattaacgaaaaaaatatcttgtactccttttgtaacttttttaaatcgaaattttctataaaacaataggcttgtcttccaaataaagcgttatttgtaacactgttatcaaagcaaagtgctcgtgacatttccttgatattcaaaaacattaataacctattatgtgaagttttttgaaaatttaggtttaacatctttaaaataggtgtattacatattacataacaactaaataagaaaataaaaaatctaagggaggaaaaatacgatgcataagaatgaaagaaaaccggtggtttatgaatatcaaaatgaacaggaagtagttatgaaagtaaaagagctagaattgcaagggattcaccaagatgacatttacgtcttaacacatgaaaaacatataacaaaaaagattgcggatgatacaaacacaaatacgattggagtaaaagaacaaggattgggcacaagtattatcaactttttctccaaaaaaggggacgagctccgaaatcaaatggaggaaatggggttgtcgaaggaggaagctaacttatatgaagaaaaactagatcaagggagaattttacttctagtaacagatgaaacactaacggcgagtgataggcagccgcaaaactatcattctctctaatagattgcaatatctgataaatagataagttaattattttaggttgtagcatggaagaaaataaaagtagagaagggtgagaaaaatgaaacatacaatatttaaatatgctgtgattgggattacgaccggagtcatggtatctctgttaaaaaaagaaaatcggaaagctatacaaacaaaaggaaaaagcgtaaaagacaaactacaagaaggaaacataaaggaaacattagagaaggtaaccgagacaagtaaacaattctctgtaactgcagctaatgttgcaaaacaaacattaccacaactgcttacagccacaccggttgtcatttctactattaaagatttaacagaaaacgaaaataacaaaaagaaaaaagatgaaaaggataatgaaataaaacaaaatagtaagaacctagacggagaaaaaacggaaaatgaaaagaaatatgtgaaagaagggaaagaagagagtgcttagatttaattctaaaaagagaaagtgaggaaaaaagtatgaaatctctgtatgcaattgatgtaggaattggttttactaagcgggcatatcgacaggatgtagattctgaggtgacgattaagagtgaagctgccacactagctcctgtacctaatcatgctgaaagtgaagatttaacaaaggtaagttttatagacttagactttgcatactacatgggaaatgaagcacatcaatctgacgcttcatttcttcctccatttgacgaagaaatagaaaattattatgaaagcgaacagtttaaacaacaaatatttggttgcattgcaaaggattataaagaaaatgtcgtgttacctttagttgttaccgggcttccagtcacttgttttggtagtcagcatgagcaattacaacgtgcactaaaaaaagaaacttccgtacaaattgatgggaaatttattaatattacggttgaaaatgctttgattcttcagcaaccgatcgctttacatgcctatttcttaaaagagggaatcattcaggaacaagatcgcatcttaattattgatggtggatttcgtacattagaaatgacagatatgaaacagaatgtcattttaaatcattatgagacggaactaggatgtagcaagcctttgaaaaatattaagaatatcctgcagaatcatgcgggtgaaagtaatcaattgcatattaatgacatgccaaaaatattagaaaaaggatatggagataaagaagaaaattatgagacaagtcaggtggatattttaattcaaaaagagttggatacacatttccaagacatcatgcgtgtattacaagaacaatttaagttagaccagtatgatactattatttggacaggaggagtagtagatctccacaaaaaacaaattgaaaaaatgcaaggtgaaattgtttctttccgtatggtagacgcttcaaaagaggccgcgcttcatggatactatattattggaagtcaagtatttgaggacatcaccaatcaatctgcatataaatccaaattataatgacgaccgaaatggagttcgttgaatagacgtgccaaattgtgtggcttcttttccaaatataaataagaaaagataaaaagtgcttgtatagaggaaatgtttaaaattgagaataaaaataactaatatatagggggtcttcctttttaaagaataagacctcctatgcatttattttgtaatttagatgatttaaaaacttttcctccaagatatggatacctacatacaaatttcatattacggatatgattcgatcaaacataaaactatttagaaaggaagaataatatggaatgcataaaaatgacgaaatggagttggtatcatgtgaaaactagtgagcttgaagaaatttcttctataatcccccgtgatgtaacatcttatttccctcaatttgtaaagaaaataagttctccttgtgaaaatggattatatgtttatacgttatcaccaagtcaaacttgtgtatatggttcgtttttatatgatcaagataaaaaggacgccaaaattcaaaaatttcttcattatttcgtagctcatgggatactgataacggtccaagaaaaagaggaagaagattttcaagaattaatacataaattccctataggtataaaaaattgtaatagttccgctgaaggactatgtgccatcttatcgatatttatatctcactatttacgaaaggttgactattttgaaaacaatttcagaaatgtgttatgggatttttatcattataataacatagcagttttagaaaggatttatcatattcgtcatgaattatttatgaacacacatgtgtttcgcttaatacaagaagtgttacaaggcttggaggaagcttggttagaaaaactaacaaacaccctttgttataaacaaacacacgtaaaattagagcgtggattacaacttgttaaagagtaccaagaagaattagacacgatgattcatttgcaagaagttgtttcttctcatcgtgggaatgaaattatgaaagctcttactgtattaactgctgtgagtacgcctttgacagccttaggagcattatggggtatgaattttaaatacatgcctgaactagaatggaaatatagctatttaatcgctctcttatttattattttcacaacagcgggtatgtatatgtatatgcgattcaaaggatggacaggtgatttattacgagtaaagaaaaagaagtctttttttaaatctaattagtcctgtttataaaaaatatgatagacatatagttaataatatttattaattggggtagtgccatatccctatcaagttaaagttttgatgtccccgcaatgataaaaataaacttggtttccataaaaaacataatattttcatttaaaggctatgaggtgaaatgtcatcatcttcatcacgtttgaccttcaagaaataaaaagttaaactattcttgtactcgaagtactattatagtactggagagataataactttactattttggtatgaggtgaataaatgatgaaagatcggattgccaaaactgctattgcgctttttcatgtaaggggaataaaattcacaatgagtgatttagctcgtgatctaggtgtaagcaaaagtacgctttacgagcattttccatctaaggacgagcttattggttatgtagttgagcaaataaatgaagaagcccaaatacgttttcgggaaattatcgataattcgaatttgaccataccggaaaaattaaaagggattcttttaattgtgcctaaggattttcagcacagcttcgtacgtttactgattgaactgcgacgttaccatccagagcagtgggcaaaaatagaacaaggcataaatgaagaatgggaggtaattactgggctagttgaagagggcatcaatagcggtgttttacgttcaatggacattccagtgctaatccaaacactcaaaacgttaatgaaatcaatttttgaacaggggagtatagcctctaaccaaattactctacaagagtcacttgcaatgatggccgatatcatattgcatggaatcacaagtaaggattaaatagtacttctacataaaaaatgagtagggtcacaataaccatacaggttaacgtagcctcgctcattttttatttttatcccgctttaatgggcagtaagattcctacctcaaaattcagtgaaagcaaagaatttaggtgggagatcaactgcccattaaagtccgattggtgagggctgattaaagtttcactttatgtcgattttacttaagggtaattatactttacagtctggaagatttcggtataatataaaatgagtaccaaaaataatttttcggtactgaaggtacgaattaaggtaatcagagatggaaacgaaaagtttgtaattttaaattgttttttcaatttggctgggatgtccttgaagataaaatacgggtataggaggaatgtaaatggatttttttgagactgttataatcattgtgaattttagtattctaggctgtatattgttttttagtgagaaaataaaacaatggtctgtcttcattctaacagttgccttttgtgtggttggtgtgcagcttatcgtagaagggtatcgctggcagatgattcctgcttatttgtccccatttattttaacaagctgctatctatttgctgaatcaaaaaagaacgttaaaagttgtggggcattcacagtcaagacatcgctactggtcatttatttgactattgcggtcatgcttccttccctcatgccggtagttttatttgaaaaaacgagcggtcccttcaaggttggtactacactttatcattggattgattataatcgagaagaaccttatatgaaagatttgaacggccggcgcgagctgatggttcaggtttggtatcctgcaaaagaaaaaggagagatgaatcgcgcaccttatatccataactcggatgagattgccaaggggttggaaaaatcattgtctattccagcattcgcgtttcatcatctaggcttgatgaagtcgaatgcattcatggaagctcaattgtcagattcagaggaacgttatccggtcctactcttttcccatggtttaagcggttttcgcaatcaaaacacgtttgaggtggaggagttggccagccaaggttacatcgtcgtaggaattgatcatacctatgatgctgcagctaccgtctttccagatggcagaaccgcttttgtacagtcgatcaatttaactgattttgccgaacgagattgccatatcaaattatggaaggaagatgttgtttttgtacttaatcaaatagagaagcttaaccaaagcgataaagataatcgctttacaggaagaatggatacatcccgaattggaatgtttggacattcttatggtggagctacagctgcgcaagtgttagtggaagactcccgtgtcaaagcagccatcaatatggatggtacattatatggggaaaatgttccgaaatctagagttggaaaaccgtttttgattatgaatgcagagactagtgatgattccacggaagattttttagagggaaaagttcgtagtgaccatgcacttgcaggtggtggcatgtcaatggttattccccataccaatcatacgagtttcactgattttcatttgttctctcctttgttacgaagcttagatgaagatccaagatacgttcaccgtattataaacgaattcagtctcgctttttttgatcgatatgtgaaacaggtagacgatagctctgcgcttgaaaaattggactccaaatacccagaagtgaaatttaaagtgaattgatgacaatgtcttttaatatatttgctaacagttgggtatatattttaatcatcaagaaagattgccctctgtagcatacagagggcaatcttttttaaattaatataaaggagtttttttatgtttaatagattgaagtattttcttttatccgagaaagaaatagttgaaactgtgaagaattacaaggaggaaaaaatacatgttttcataataaaagattttttaggggagttaatcttaataagaactcttatatttttaatgtttgttccaatatcaacttttattttttcagttgtaatttttggagctgttttctttttatccggtattaagattaccatttggggcattgctataatgttattggttccaataacattacttttctatatgaatataactaatacatcaattattattactgatttagtgaagaaatttttattaaccataaaatatctaaatccattttactcaatattaaataaaccttggttatttatttttgaattattatttggttttttatatgtcttcgtgctatctttgttttctatttggatagtattacattcattagaaataggtttctctgaatttagttcggaggacaatcgaagtttccaattttcaattattattttgcatacagcaatttatttgtttataagagttcatggccagccttgtaagacaactaagcaaaaaattaaaaaactgaaaatgaaattttatttatggttttgttctatgattgcaagtattgtatatatatttgaatcactctttaattatatgaatggaattcaagcaatttattttatatttgttttaatgattgctttagaaagaacagtgacacattataagaaatttatagattttttagaatctgaaaatttgtatgaaaaataattttagagagaaaagtcatttgaaatataaaaagttatacctactaagtactgaacgagtaaaaaaacgctattctttctctagaatcataggaaaggatagcgttttttatgtctatttttgtatctgatgaactacaactatttgctcaagaaattcaatgttatttatccccgaacatcttaagaaatcttgccagagagtctggtttcgtgcaacgaacctgtaaattccaaacaaaaagtttactcaatttatgagtatgtatggaaaaagaaagagattcaataatgctttatttaatattaatttatacagaaatacatattaaacaatatgtaataatacattttatgatgatttattaaaataaaatgttatatttttgggtggaatatataaatggaggaaatgttatgaacaagaatttaaaatttactcaaatgatgatcggtattagtacgatggcattatcatttggaagtattcaaacacaggtatccgcagaagaaaaagcaccctataatacgttacagatgaaaccgattgggacagaaactttaaaagatgaaattgcacatgctacaaaagcggatggaactttaacttttgaagagcgtttaaaagtaggcgatttttcacaacgacctacttcggtgatgaaacatgatgaaaggcaattaaagcaaagctatactctggcagaattgaataaaatgcctgatagtcaattcattgatacgctatcaagagtttcatggaatcaaattacagacttatttcaattcaatcaagatacgaaagctttttatcaaaataaagaacgtatgaacgttatcattgatgaattaggacaaagagggacatcttttacgaaagaggattcaaagggaattgaaacttttgttgaagtattacgttctgctttttatgtgggatattttaataatgaagtaggttacttaaaagagagaagcttccatgacaaatgtttaccatcattaaaagcaattgcaaaaaatccaaactttacattaggtacagctgagcaagatagagtagtagttgcgtatggaaagttaattagtaatgcttctagtgatgctgaaacagtacagtatgcagcaaatattttaaaacagtttaatgataacctttctatgtatgctaaaaattatacgaaagaacaagctgtatatgaaattgtaaaaggtattgattatgatctacagtcttatttgcaggaaacgaataaaaaacctaatgcaacaatgtggtatggaaaaattgataattttataaatgagattagtagaattgctctcatacggaatttaacaactgagaatagttggctaattaataatgggatttattatgcaggacgtttagggaaatttcatagcaatccaaacaaaggattggaagttattacacaagcgatgaatatgtatcctcgcctaagtggaccttattttatagcggtagagcaaatcaaaacaaactacggtggaaaagattatgatggaaatacagtagatttacagaaaatacgtgaagaagggaagttacaatacttacctaaaacatatacatttgatgatggatctattgtttttaagacaggcgataaagtaacagaagagaaaattaaaaggttatattgggcagccaaagaagtaaaggcacaatatcaccgtgtaattggaaatgataaagcactagaaccaggtaacgcagatgatgtgctgacaattgtaatttataataatccagatgattatcaattaaatagacaattatatggatatgaaacgaacaacggcggtatttatattgaagagaagggtactttctttacatatgagcgtacaccaaaacagagtatttatagtctagaagagttattccgtcacgaattcactcattatttacaaggaagatacgaggttcctggtttatttgggagtggagaactatatcaaaatgaacgcttaacttggttccaagaagggaatgcagaattctttgcaggatctacacgtacaaataatgttgttccacgtaaaagtattataagtggcttatcatctgatccggcaagccgttatactgcaaagcaaactttgttcgcaaaatatggatcatgggatttttataattattcctttgcactacagtcttatctatataatcaccactttgaaacctttgataagattcaggatttaatccgtgcaaacgatgtgaaaaattatgacgcgtatcgtgaagcattaagtaaagatgcacagctgaatacagaatatcaaacgtatatgcagcagttgattgataatcaagataaatacaatgtaccacaagtaacaaatgattacttaatacaacatgcacctaagccgttagctgaagtgaagaaagaaattgtcgatgtaactaatataaaagatgcaaaaatcacaaaacatgagtctcaattttttaacacatttactgtagaaggcaagtacataggtagtacatcaaaaggtgagtctgaagactggaaaacaatgagtaaacaagtcaatcaaaccttggagcagttgtctcaaacaggatggagcggctataaaacagttacagcctattttgttaactatcgtgtgaatgcagccaatcaatttgaatatgatattgttttccatggtgttgcaacagaggaaaaagaaaaaacaacgactatagtaaatatgaatggaccatatagcgggatagtaaatgaaggaattcaattccatagtgatggtacagaaagtgaaaatggaaaaattatttcttatctatggaactttggagatggtacaacaagtactgaagccaaccctacccatgtatatggggaaaaaggaacatatactgtggaactaactgtgaaagatagtagaggaaaagaaagtaaagaacaaacaaaagttactgtaaaacaagatccgcaaacaggtgaatcccttgaagaggaaaaggtactcccatttaataagcttgtaaaaggaaatctgattgctcctgatcaaacagatgtttatacgtttgatgttacagttccaaaagaagtagatatttctgtggtaaatgaacaaaacattgggatgacatgggtactttatcatgaatcagacatgcaaaattacgtagtttgtggtgaagatgaaggaaatgctataaagggaaaattcgtagcgaaaccagggaaatattatttgaatgtgtataaatttgatgataacactggtgaatattcattattaataaaataaatttattttccatatgtatataacggttgttttttaggaggagtctgtcacgataggcttctcctaatttttactctaaaataagttaataaattaggtaattatctctaaaaataaatcattataaacctaaaatattcaattaaaaaatagaagagagggagcttgcgtcttaataaaactaatattaggagttatgtcacatttcgattaaataaaatatcgtaaaatcctcagaataaatttttttgcatgttcattcatttagggtaattctcaactcttaagcagatgtatgtgggggaccgattcatatacatctgcttaaataattagatattttatttattaagttaagcgaaattttattcgtatatgaggaaggcgcatttaattcttttttcgaatgttattcatgttaatcgtattccatcgaatgcgcttgttaccaagtgatgtacataggaatcatccaacttatcaccggttactagcaaccgataaaaaattggtccgtaaatgagatcgatggataattcaatatcaaggttttctttcaattctcctctttgaattcccctctctagaagttgctttgcttgcagtcgacggggcggaaacatcgagtacgatattcttccgccagttttaagtcaacgtttgattttctctttgcaaccagaagtgcgtagtcgcttaaatggattattcatgtctattttctttttgggtggtgctgttggaccctttgtcggaggatgggcatacgcttgaggtggatggagtgtagcattgtggatcggaatcgcttgaatgcgtattcattgatatgtctgagttttatagattatttgcggttattttgaagtttttacatcacaaccagattttttgtctctatcgctaaaagagggcaaaactcaccatataaaatgtgtccgaattccatttagactatgaaaaaagagagcttgcgctagacaacaagccctctaaaaaataacgtaattgagatatctatatattaacagttattttctaacgattccatatgtcttatgttgagaaataaattataagtggcttgataaagctaaaatgaatgattgacataatattttgacgataatataataaatctcgaattcaaggtaatttgtaaaggattggtaattgtgagcgtgattaacgatgagagcttatctttaaagttaattgttatattatcaagggaattacagccaatcactaaacgtattgaaaaggatctaaaaatttatggacttaatgcaactgaatttgcagtgcttgagctactatacagtaaagctgatcagcctataaaaaaattggggacaaaatattacttgcaagtttttgtatcacgtatgtagtggataggttggaaaagaagaggtgaaaccatgtcctaaagaccgccgtgtcacgtatgcatcaattatttcagaaagtattgaattggtgacactaatttttcctcagcataaagaggggattcggcaaatatttggtagtttggactatattgagaaaaaatgataagtaaacagttgaaaaagttaggatattacgcacagaaagtgtaagtttttagatgttatttctgtttagtaatatcctaattaaatataaattaaataaataggagggaaaattaataaatagtagtaaatgtattgtagtacaaaataaagaaattatgtaattgcaattgatatagtaggaaagatagttgttatgcataacgtatacatattgtccttttcattataaatctttcataaagcggagagtgggagtgggtatcaagaatggaattacgtcatttagagtactttattcaagtttgtaataataatagttttactaaagctgcggaagttctaggtatttcacagccgactttaagtcaacaaatccgtgtgttagaaggtgaacttgatacacctttgtttcatcgagttggaagaggtatcaaaatgacagaagcgggtaagctgctatttgataaaggaaaatttatcatgcaacaatttgatgacgtttataatgaaatttttgaattaaagggtgtaaaaagaggtgtaattactataggaggtttattagaggatctcacttatttaacaccttatattatgaagtttcaacaacattatcccaacatcgttgtaaaaattatagaatccgaagttgctgtaaatcaaatcgttgataaaaatattgatataggcatcacgcgtagtgctcaaattccagacacattaacaagtacccttttgtatagcgaagagcttgtccttgtcattcccaaaaaccatcctttgaatgaaacatcatttgtttcttttagagaattagtagggctcagtagaataatggtttcatgtagttgtcgtgaaactattaaaatatattgtgagagtttagggctatctttatctgaagtaaatatagaaacaaaatcttccatttctctattgagccttgtatgcaatggacatggggttgctataatacctctttcactagttgactttgttaataatgatactttgagcatagttcgtattattgatccaacaccaaggcaagatattaatcttattcactttgatgataaatttttaagttttgcagcacgtatctttatgcagaagttacatgatcctgaaaaagtattagtataatagaaataataatgattatagtgtgagaattaaaaatgatacataatccttggggtaagagctaaattacagtcaaagggcattgactttatatgtgtggtgtgatcgattcaaatgggaatatcattgacttttacttaaggaaaaaagggcagactttgcaaggggagaaggctgttaaaaataagtcaagttaattaattaactcttcggttttatcacatagtaatagattccattagggagatactgctatttctttttacatatccttattgcataaagaaaaccaccggcattataccggtggttttgatttagaaagcaaagcaagtacaaccaataccccatttagttccatcttttcctattacggtatgagtgtgttgatggagagggttactgcaactatgtaacttgttatcatgggcatcgtgagaaagtatagtgttggctaggttagcaccgccataaccataaacgcccgtcggtgaccagtcaggtgatgctggcggcaattcaggtgataaatttttaaattcatcatttccatacacaacctgtccgcccataattgtgagtaatgattcaaggttcttgatttcttcttctggcacagtaaagtagtcagcagacaatacagcaagatcagcaaactgacctactgcaagggttccttttttaccttcatcaccagagaaccacgcacttccttttgaatataattccagggctacttttctatccagtttatttttttcatcgtatatcgaaagtccaccaatggtttttccggcaaccatccaataaagagcgacccaagggttatagctggaaactctagttgcatcactaccggcgccaacaggtataccaaggtctaacatacgataaatcggaggagtacgctttgcagcttcctttccgtataaatcaacaaagtattcaccttgaaaagccatgcggtcttggatggcaatacctccatttaaagccttaacacgttccatgctacgatctgagattgtttctgcatgatcaaaccaccatcgtagaccattaaaaggaatttcactgttaacttcctcgaatacatttaagaaacgtgtgattgactcatcataagttgcatgtaaacggaagggccaacggttttccaccaatagagaaattactttctttaagtcagcttccatcatcgtagctagttcaggccgtggcatttgaaatttttcaaaatcggctgctgagaatactaacatctctccggcaccattcattttatacttatcagttccttgacctggagaaacaatttttgcccatgaagcaaagtcttcatattcatgatttggattttgcgtaaatagattataagcaatacgcaaagttaattgttccttctcggctaaatgttcaacaactttgtaatcatcaggataattttggaatccaccacctgcgtcaatagcacttgtaatacctaatctatttaattcgcgcataaaatggcgagttgaattaatctggtcgtcaaaattaagtgctggtgctttacccaaacttgaataaagaatagaagcgttaggattcgcaattaaaaggcccgttggattacctcgtttgtcccgctcaattaagcagcctggagggtctggtgtatcttttgtatatcccagtgcatgcagcccagcacgatttacaagtgctctatcgtaaagatgtagcacaaagacaggagtgtcttcagaaacggcattaatttcttccaaagttggcaaccgtctctctttaaattgaaattcagaccaacctccaactacccttacccactgaggagcaggtgtacgccttgcctgttctttgagcatttctagagcaataaaaagtgatggcacgccttcccaacgtaattccatattataatgcagaccaccacgaataacgtgtatatgagagtcattcaggcctggaatagctctctttcttttaaggtctattttttttgttttttccgtggcactattaagaagctcatctccacctactgcagtgactaaaccatcagttatggcgatagcagatacctcaggctgagaagggtcaagggtagtaatttttccgttatataagatcatatccggtaaattcatgttcacacctcgtctactttctattattttgtaaccatggatgaaataatttaccgaaaatcggcatgactacccatgatagcaaggacactatacatactgaaacaaaaaaggccgacataataggattcatatgttttataataggtcctatcactttaggaactaacatgctaagaggccatacacccaaaagggtaacgatagacattttccattttggcggtggaactggcgttttcggagtaacaaaccaataagccaaactactttcagttttgtaactcggattagtaacttgaaattgttctgccgtttttaacaaatcccggcgaatgtctgattcttgccaagcacgtagatgctcatacgtatcaaagcgaaaaataacagtatactctctcgattcgttatttgggactattagatttacacctaaatgccctgggaatttagtagcggcagcttcgatttcatgtctccatgtttcaaactgtttttctttaccttgttgaatttcccatgtaacaatcgttgttactggatcagcagcatccatcgtgttccctgtataagtctcttcgacagctactccttcttgtttcatattttcctgcttggaagcgcgccgtgcaccatagtatatgcgtattctactccttgaccataagcgccagtgtgctcctttacaatttccattacagcatcataagtgtctttgtgtgcccagtcacgttggtattcaagtaaaacttgaattgctgtcactggaattgcaccagcttgttctacacgacgcatagcagcgttatgtgctgtcagactagtaccacctgaagcatcatcaactgcatacacttcatagccagctttcattgcttcaagcacagggaatgcaaggcaaacttcagtccaaagtgctgcaaatattaatttctttctacctgttgctttaactgcttcaacaaattttggatcttcccaagagttcattgaactgcgttctataatttcatggtttgggaatatgtcaagaatttgtggccaaaaataaccagaaaagctgcgtgtctcaactgtagtaagaatagtaggtacgttaaaagtttttgctgatttagcaagcaacataacgttattaatcaatgtttgtctatcaatacttgcaactccaaaagtcatttggggttgaaaatcaatcaaaattaatgcactgttctccggatttaacaattctaacttactcataataaaacgctccttttttaattgtttatcgaaaataatatattttctgtcaattaaaacactgctatactttttaatgtaaaatttagtgctgatttaatcagcactaaatttatactatctactttaaaaagtgatttaaagctatttccttggaatacacttatacattttgcttactaagatctcgttgagctcccctatagcttccaattatattttgatagcctggaagattgctagcaagcaaattgccaaaaccttcgacatcgttgcgccaatcgcgttgtaattcgcaagctacgctaaaccagttcataagttgtacgccattatgtgccatacgcgtattggcagcatctgcaacttgtttactgaaagttcctgaagcatcagtaacagcaaatacttcatatccagcttttatagcggaaagtgctgggaaagcaacacaaacgtccgtaactacgcccgcgatgataagttgtttttttccagtttcttcgattgcttttacaaaatcatcattatcccatgcgttaatttgtccaggtcgagctatttttggtgcatgaggaaagagatcaaccaattcttgcattaaaggtccattaggcccgttttcgaaacttgttgttaaaataactggtaaatcaaaaaacttagcagtatgagcaagggctaaaacattgttcttgaattcatcaacaccatagtcacgtactagtccggacataagaccagtttgatgatctactaaaagcacgagagcatcatctttgttaatacgagaatagagatcagtcattatgtattcctcctaaaaattaagtaatcaaagaaagtttaaatagtcgaatactatcataagtttcttcgtttataactaagctgaccaataatattggttatagcagcattcacggaacatgaagcgctatacaaatttatagtatttgaaaactgattcgttaatcaattctaaattatctatagtttgtataggtggtaactatagttattttcactataaaatgaattggttttacctatacattctatagatagaacgatattgatagtcacctacttttgttattacaattgaataggagaaatgttcagcaaatacttcgtgatgaaaaaagtatgagatggggaagcgttccataaacagaaaatgaattcatcggaacaatagagtttcatacttagcgttcacaatataaatgtgcataaataggttatgagattcatccggattattgaagaaaaggatatatattaaaggaggtaggaaaatggcaaaaattactgtaggaaccgaaaatcaagcaccaattgagatatattatgaggatcatggcataggaaaaccagttgtactcattcatggttggccgttaagtggtcaatcttgggaatatcaagttcccgctcttgttgaggctggatacagagttataacatatgatcgtcgaggttttggaaaatcatctcagccgtgggaagggtatgaatatgatacctttacttctgatttacatcaattattagaacatttagagcttcaaaatgtcacacttgttggtttttctatgggtggaggcgaagtagcccggtatattagtacgtatggaacagatcgtattgaaaaggctgtttttgctggagcagttcctccatatttatacaaatcagaggatcatcctgaaggggcattagatgatgcaacaattgaagcgttcaaaagtggtgtgattaatgaccgccttgcatttcttgatgaatttactaagggatttttcgcagctggtaatcgaacagatttagttagtgagccattccgtttatataattgggatattgcagccagtgcatcacctaaaggaacacttgattgtattaccgcctttagtaagacagattttagaaaagacttggagaagtttaatatacctactcttattattcacggtgattctgatgcaactgtaccatttgaatatagtgggaaattaacacatgaagcaattcctaattctaaagtaacgttaataaagggtggtccacatgggctaaatgcaacgcatgccaaagaatttaatgaagcactcctattatttttaaatgactgattacaactatataattgttaattgataaattataaacaagtaaaaaataaagctttataaaagatgctcttggataaatccaggagcatctttttaaatggtgatattgagatgttaggttgataaatctccattaattttggattgaatactcttcttaacagctaaaatatattgattagagttttttagatttcttagaagtattgttatattactatcaagataatattttgaataattctcaaaacaaagaaatatacattttttgaggaagaaatatcttgtcagaaaacaatgaaatcttattaatttttataattggtagaatttttgtggaaataattctcttaatatattaaaataacatcgtattatgtcagattttaattaggggagagaaattttatgttgaaaaaaatcattccagttgctttagcattaagtacagttacttttactagtgtatttgctatgccttcagcccaagcaagtacagaatcaaaccgctacatagatgtacaaatgctcggtattaacgattttcatgggcaactagacactgtaaaaaaaattaacaataaagatgcagggggaattgagtacttaggggcttatttacgtgatcgtgaaaaacaaaatccgaatacattaaaggtacatgctggagatgttgttggagcaagtactcctgtttcagcattattacaagacgaacctacgattgaatttctaaatgatttgaaattcgatgttggaacgatagggaatcatgaatttgatgaaggtgttgaagaaatgaaccgccttatttatggtggataccatgagaaaacagggaattttaaaggagcaaaattcccatatgttgctgcaaatttctataataaatccaccggtcgtttatttttaccaccattcactataaaaaaggtacaaggagttcctgttggatttatcggagtcgtaacaacggatgttcctaaccttgttatgcctactatgctaaagaatgtagaaattacagatgaagttgaagctattaacaaatccgtaaagcaattaaaaaaactaggcgttaaatctatcgttgttcttgcacataacggaggtataacagatgggaacggcgtaacaaatggtgatatcgtccgattagcaaatgagactgatccagaagtcgatgttatttttggtggccatagccacacttatgtaaatggaactgttaataataaacttgtcgtacaagcaaattcatatggtatggcttttgctgatgttgatgtaaagattgatcgtaaaacacaagatattgttgagaaaaaagcagaaattgttacaacttatcatgaaggcatagagcctgataaaaaaataaagaagaagatggagaaatatcaagcaaaaatcgcacctcttgttaatgaagttgtaggtaagtctattgcgccactagatcgcaaactcaatacggctggtgaatctactcttggaaatttagttgctgatgcccagcgtacaacaatgcaatcccaaattgcacttatgaatcctggtggtattcgtaatgacttagatgctggtgatattacatggggagagatatatggtattcaaccattcggaaatcaattaataaaagtaaatttaacaggtcaagacattcgtgatattttaaatcaacaatggcaaaaagacataacaagaatgcttcaaatttcagggatccaatacacttgggatgcgaacaagcccaatggagaaaaagtaacaagtattcgcttaacaaatggagaagaaatcattccttctaaaacttacagcgtcgttgctaacgcatttttagcttcaggtggagatggatttgtatcttttaaaaacggtaaagatgctgaaacaggaccaactgattttgaagcattagtagattatataaaaaaatcaaaagaaccaattcagtctgttattgatggaagaattcaaaaaataaattaggtttttgttaatcttaaaaacaaatagattacctgtgcactatactttttcgtgtgcaggtaatctatttgtttgcgttttcgggcacagacgctacttcaatcctatcaatatagaaacaatttcgaatgtaaggaatttgtaaggaaaaagagattttcaattatatgtacatttatttaataaagtagcgtatctcattgaagatagtttgttaaaacgctcattgttacaagttacttacatgattaaatataaaccagtattaaacaaagaagtacaaaaagaattcccagagttgtatactcaatacattaagcagacaaataaaaaatctatgttgttagaaattgatgaagctaaagaaaaaggggagggaaagggttcccataaaaatactagaagaaattaggttacttatgcataaatagcataagtaggcacatgttatttataaatatattggaagtgcaattatcaatatttaaagatacgaaagtaatacaaatgaaattcttatttctactactacaagtactattgagcaaatgaagtatgaaattgcttttgaactaggagtaacactgtgacttgatacatcatcatctacaaatggttcggatcggtggagagattacaaaacgcttagttcgaatggttgaaaaacagttaacaggtcaatacagattacactaagaaaataatccgtatatatacggattatttttcctttaatttacaaaaaaataaaatttgaaatcgaaaaaactcctcagattcctttgtaataaacttttttagtcatgttaatggaataggtatcgaaaggtgttaaattagatatggaagatatatgagcccttaaaagggttttggtgttattcgcaattttaattccataattacttaagccgatataataaaatgttctatgtctaaatcgatataaaataataatcattaagtgatatttcttttttatagaataagtaaaaactgatattgtagtaattactgttttgaggtcaatttactgtgcaccttaattattgaagtttttttgttgattaacaactattgtatttggaaattaataataagtttatcccgctatttgccgggcagtaagacctccacctcaaaattcagccgaagccaaagaagttaggtgggggggcgggctgcccgtaaaagcccgattggtgagagctaataatcagtgggggatgaacaaaacccccactgattaaagtttcactttatgtgatgcggtaataaaactatctagtttgctattcttagtatttgtaaagtctatatatttttcctcttttgtggaaagtaaaactattgttacgaccagtaatatagtgtcatgtttttgaatattccattcgttttttatttttagttgatgaaaagacctttctctcaattaaatatttaattgagtacttgaatttcctccaccttgtacttttcaaagcatagtgcttcaaaaatagccgtatcgctttcatctgtttccaatttcacaacttctttattatctttttctaaaatttggagcaaaatagtttttcagtttcacatttaaattagcagtatttattttttgaattcaatttgtataaatgattgaattggaactttgactgttgtttcttgcggtggtacagtatctcctgttactttcgctttattttaaatctttttccagcttggtcctcgcattgactaccactgtattttgaagtacttcactgttttctcaagttcaataattatattttgtagaattaagaaaagaacttagtgtatttcctttacgtatctactctgatatttagatgctaactacaattaaataatatatgatttttataaaaaagatatagtaatattttgttgtgaattgtactaatttgatattttatagtattatttgtcgtgaattatatataacaaaatatattttatggatctataaaggagaatgtaatgaatacttctatcgatatacaacacttgtgtgatcttgcacataaagcatttaatgcccctgtacatattttatctgcagacagaaaaattttatatcattctacatctgataatgtttgtagtcctttttattcttcaaaagaagaacatcttagtgatatttatcaagaaaacgatccctgtaacttgccactttttcgaagcaacaactatcttgaaaattttgttctaattcatatagaaaatcatgatgatattaaagggactattataatcggtcctactatacattcaaaagattcagatgatatgatcataaaatttcagaaagaatttaaatcaaatgataacattcaagaaagacttgcctattatcagtgtttatcggagattaaaaaaactacattaattgatatgggaattttattacattacatgattttcaatgaaaagttagatgtagatattgtcttggaaaaaaataaagtactagaggaaactcctaataaaaatgtgaaacctgatttatatattttaaaacgtcgacaaaacaaacctaaaacgcacaatatggcattagtaaatgatttcttttcgactatcaaagaaggaaataaaaaaaagttaatacagtatatgtatgcggtttcgcaagaagatgttgaacttatgctagtagaggatccgctcaggaatcaaaaaaaccttggaattattgcgattaccttagccactcgatatgcaatagaaggaaatctgccaccagatattgcttttgcccatagtattttatatatacaaaccctagaacaattagataatgtagaatctgtaaagcgattatcaggggacgctttacgtacctttgcagatcgtgtgaaagaatacaatgcaaaaaagtattcttacgcggttactacatgtataaaacatattaataaaaatgtttacgatggaatatctctgaatgaacttgctaatcatttagaaattacgcctacttatctgtctaaactatttaaaaaagaaatgggaattactttaagtgaatatattcaaagggaacgagtggaagaagcaaagaaattattaacactcactacttattcgttatcagatatctgtgcttggcttaactttaatgaccaaagttattttataagagttttcaaaaaaatcactagcatgactcctaggcagtaccgtgaaaaatatacaataatataagtttgttatctactgtctccaatgtaaagacttaaacatgggtgtaagtatcccaaaagatgaaaatactgaacttattacgctagaaagagtttgtgatttgtctagaaaaagaacttgtattcaaatagacgtatgagattaaccagatattatcttgttagcggaacagtttcaatttttaggagttagaaaaataatggagaaacaaagtatatctatttttttaataacaatcatgtgctgaatttatcccgctatttgccgggcagtaagacctccatctaaaaattcagcgaaagcaaagaagttaggtggggggggtgggctgcccgtaaaagcccgattggtgtgggctaataatcagtggggatgaacaaaacccccactgattaaagttgcactttatcggtatagttctaaatcagataaactagtctgacgtcagctcaaacaaatagctcttgaagactttataaacacatatgtgagcaaaagctcaatggaaatctttgtaccatattgttaatttgaaaaaatacattaaccgttattttgctaaaggaaataaaaagacagaaggctgcaaagtgttccatggaagctttgcagcttttttgtaatttaaaacctatgtttataacgatgacaagtttatagactaatatcttcatactagatatttgttaataatgatattagaatgttatgtaaaaaaatcaataatataacatatattactaaatatatctacatgttatgcaattatgcataactaaataaaggtaaaaaagtataaaaagacctattatattattctataagtattttttctaaaataaaatttcttggttgagctaaaatagttatttttaaccgtatacacattaatttgtaatcattccaattacagaaatgaaatttacgaataactatatttatataatttttttcgggacatatttttatttaacagtgaattatcgagcttaatcgacaaaatttttctatttacgcattaaaaatttaatgttttaatgaacaacataactggtatgaccagacagaaaggagaaggttacgctaataggaattatagtgaagttataagtaacattatgtctttaataattttctaaatagtcaatttatttataagaggtcaagaatcaaattggtaataaacgtgttctaagtttctgcataacaaaagtgaagttattccgcaataaaagtataagcaatgtacagtataatttcatcttttgttgtctagtaaggagtttgctgacaaaactaagagggatattatcaaattgaaattaaacaatgttatgacaggattaactgtaagcattggtttattgatcctcacgattctgtaagttaaaccgcaactttaggaaagaattaataatttactactcataaggtgcctgattcaaatatagttaataaatttttgttatttatattttaaaaaatagagtatcgaaatgagagataaataaaatccttatatcctattagaagtaaaaaacaacgatattaacgtatctgaaagatttctccttcttatccagtttacaaagagagcggtcgtacaagttatatgaattaagttataaaaacaatggtaaaggagtgtacggaatgaaaactaaaataatgacaggatttttaataacatccattgtaactggagcaactattcctatcaatactctcgcaacaccaatcgttcaagcagaaactcaacaagaaaacatggatatttcttcatcattacgaaaattaggtgcgcattctaaattagtccaaacgtatattgatcaatctttaatgagtcctaatgtacagctagaggaagtcccagctttaaataccaatcaattcctaatcaaacaagatatgaaggaatggtcatcggaactctatccacagttaattctattaaattcaaaaagtaaaggatttgtaacaaaatttaatagttattacccgacattaaaatcgtttgtagacaataaagaagatagagaagggttttcggatagacttgaagtacttcaagaaatggctatgacgaatcaagaaaatgcgcaacgacaaatcaatgaattaacagatcttaaattacagcttgataaaaaattaaaagattttgatactaatgtggcaactgcgcaaggcatactaagtacagatggaacaggaaaaatagatcagttaaaaaatgaaatattaaataccaaaaaagcaattcaaaatgatttacagcaaattgcattaataccaggagctttaaatgagcagggatttgctatattcaaagaagtttatagtctttcaaaagaaattattgaaccggctgctcaagcaggggtggcagcgtataacaaaggaaaagaaattaacaactctattctagaagcggagaaaaaagcggcgcaagaagcgacagaacaaggtaaaactgctctagagattgaatcagcaaaaaaagcagctcgtgaagcaattgagaaaagcaaacaaggtgaaatagcagccgcagccgcagcaaaaacacaagagtatgacctgatgaaagccattgataccgaaaagattaagaaaacatttggcgtttttgctgaagtaaataaattaacagcagaacagcgagcatatttagatgatttagagaaacaaaatcaaaaaatatatgatttaacaacgaaattatcaatagctgatttacaaaaatcaatgcttcttcttacacaaaatgatttgcatacgtttgcaaatcaagtagatgtagaacttgatctactaaagcgctataaagaagatttaaatctaataaaaaatagcattacaaaattatctactaatgttgatacaactaacgagcagtctcaaaaagatacattaagacaattaaaaaatgtaataagttaccttgaagaacaagtatataaattttaatattgcgttttttgggaatccataaagattataagcatttagcgaaagaaggagaatagtcatgaaaaaatttccattcaaagtactaactttagctacattagcaactgttataactgctactaccggtaacactattcatgcatttgcacaagaaacgaccgctcaagaacaaaaagtaggcaattatgcattaggccccgaaggactgaagaaagcattagctgaaacagggtctcatattctagtaatggatttatacgcaaaaacaatgattaagcaaccaaatgtaaatttatctaatatcgatttaggctcagaggggggagagttgctcaaaaatattcaccttaatcaagagctgtcacgaatcaatgcgaattactggttagatacagcgaagccacagattcaaaaaactgctcgtaatattgtaaattacgatgaacaatttcaaaattattacgacacattagtagaaactgtacaaaagaaagataaggcaggtctaaaagagggtataaatgatttaattactacaatcaatacaaattcaaaagaagttacagatgtgattaagatgctacaagacttcaaagggaaattatatcaaaattctacagattttaaaaataatgttggtggtccagatgggaaaggtggattaactgcaatattagcaggtcaacaggcaacgattccacaacttcaagctgaaattgagcaacttcgttctactcagaaaaaacattttgatgatgtattagcatggtcaattggtggtggattgggagcagctattttagttattgcagctattggaggagcggtagttattgttgtaactggcggtacagcaacaccggctgttgttggtggactctcggctcttggcgcagctggtatcggtctaggaactgcggctggtgtcacagcatctaagcatatggattcctataatgaaatttctaacaaaatcggagaattaagtatgaaagcagatcgtgctaatcaagcagttctttcgcttactaacgcgaaagaaacattggcatatttataccagactgtagatcaagcgatattgtctctaacaaatattcaaaagcaatggaatacaatgggcgcaaattatacagatttattggataatatcgattctatgcaagaccacaaattctctttaataccagatgatttaaaagcggctaaagaaagttggaatgatattcataaagatgcagaattcatttcaaaagatattgcttttaaacaggagtagaactgaaatttaaaacctaaattggaggaaaatgaaatgataaaaaaaatcccttacaaattactcgctgtatcgacactattaactattacaactgctaatgtagtttcaccagtaacaacttttgcaagtgaaattgaacaaacgaataatggagatacggctctttctgcaaatgaagcgagaatgaaagagaccttgcaaaaggctggattatttgcaaaatctatgaatgcctattcttatatgttaattaagaatcctgatgtgaattttgagggaattaccattaatggatatgtagatttacctggtagaatcgtacaagatcaaaagaatgcaagggcacatgccgttacttgggatacgaaagtaaaaaaacagcttttagatacattgaatggtattgttgaatacgatacaacatttgataattattatgaaacaatgatagaggcgattaatacaggggatggagaaactttaaaagaagggattacagatttacgaggtgaaattcaacaaaatcaaaagtatgcacaacaactaatagaagaattaactaaattaagagactctattggacacgatgttagagcatttggaagtaataaagagctcttgcagtcaattttaaaaaatcaaggtgcagatgttgatgccgatcaaaagcgtctagaagaagtattaggatcagtaaactattataaacaattagaatctgatgggtttaatgtaatgaagggtgctattttgggtctaccaataattggcggtatcatagtgggagtagcaagggataatttaggtaagttagagcctttattagcagaattacgtcagaccgtggattataaagtaaccttaaatcgtgtagttggagttgcttacagtaatattaatgaaatgcacaaggcgcttgatgatgctattaacgctcttacttatatgtccacgcagtggcatgatttagattctcaatattcgggcgttctagggcatattgagaatgcagctcaaaaagccgatcaaaataaatttaaattcttaaaacctaatttaaatgcagcgaaagacagttggaaaacattacgaacagatgctgttacattaaaagaaggaataaaggaattaaaagtggaaactgttactccacaaaaatagggaaatattaattctgttgtaaagtgaactaaaacatagaaagtctatgattacactgttaaacagaaaagtaataattaataaatccttatataacagaaaggcggagtctcattaaagacttcgcctttcaattatatataagtatgattcgaataaagaataaccttgtagtttaattgcttttttaaaatttgcaatagaatcggttaatttgaagcagatgatatacattttctttaatacttaatgatttgaaggctgctaaagaaagttcaaacgatactgataaaagatgtagaactcattttgaaagacatcgctttttaataagattagaacttgaaaccataccttatataggaggaatacaaaatgatgaaaaaaatccctcataaactactcgctgtatcagcgtttttaactataacaactacttatgcagtcataccactagaaacttttgcaattgaaattgaacaaacgaacaatgaaaatatgtctctttcagcaaatgaagaacagatgaaaaaagctttgcaagatgctggtttatttgcaaaagctatgaatgaatattcttatttgctaattaataatccagatgtgagttttgaaggaataactattaatggaaatgcagatttacctagtaaaattgtacaagatcaaaagaatgcaagagcacatgctgttacatggaatacacaagtaaaaaaacagctttttgatacattgacaggcattatagaatacgatacaaaatttgaaaattattatgaaacattagtagaggcgatcaatactggaaatggagatactttaaaaaaagggattacagatttacagggaggaattcaacaaaatcaaaagtctgcaaaagcattaatagaagaattaattcaattaaaaaatgctattggagaagatgttagaacatttggaagtcataaagagacattgcaatcgattttaaaaaaccaaggtgctgatgtggaggctgaccaaaagcgtctagaggaccttttaggacaagtaaaatatcagaaagacatagaatctaagggcttagacatggtgaaaatcccctttattccaaccttgattgctggtggcataatgataggtgatgcaagaggtaagttaggttggctagaacctgaattagaaaaattgcgtcagactgtagattataaaataacattgaatcgtgtagttggagttgcatttcataatattagtgatatgcatagtatgcttgatagtgctatcactgctcttacttatatgtctacgcaatgggaggatttagattctcaatattcgggtgtactgggacatattgataaagctgatcaaaaagctgatcaaaataaatataaattcttaacccctagcttgaatgcagcgaaaaacagttggaaaacattaaaaacagatgttgtcactttgcaagaagggataaaaattgcagagaaaaaagaacaggattttttgaatcagcttcgtccatcaaacgtgttctacttttataaaaaaattcataacgcatacacttttgaaataaagactggaacaaatgcgccaaatgcgtcttataaagttatgaatttaactaaaaacactgttcataatatgtggagtggaggggctaatactaacatgtgggctgattggctttcattcaatccaaatgatgaatttgcggtagtagcagtagtggatggtaaagaatatgttgtgtataaagacaaagtacaaaatataatgaactgaatctgaaagtaacgaagtaattggagctggacaataaactagacaacaagttaattgaaaaatctccttatatcctagaatattttgctcaagaaaaagaatttgttcagcgaaaaagtaaatattgaaccaaggagttagttgtcttatgtgtatggttttaccgaaaggtttcaagtacattactcatacaattatgtagttatcctgaagcatctacaggtgttcttatcgaccttgaagaactacttagcttcctaagttgagtaattttatgcaaaattaagtgaacgtttttgtacatagattagttgacatttatatagtttttttccatttttaaagatagttttgttttttatgttatttttcaaaaattactgctgaaatttctatattcatcactcagcatataatcattgtttgatgaaatgacataccacgtcccttagagtttcagacatattacgataaattaaagaaaaaagataatagtagtcaacggttactattatcttttttgaactatttttcattaaaatatctcatctgctgtgccccttatttacttttctagattttatcctagtttaaaatttatgcatttgaactgtttatacaatttgtaggatttttagcttttttgtcgaatacacttaatgcaaggagggacattacatgattattaaagattatttcatcaacctttctattttttctttattagttagcgcagcaatatttattcaagtgtttacaattaattctagtcgatattttgaaaagctctatggagggattattgcagttacgttaatgttcttttcttttccatacatgggattttcctacgatcttcgagttgttcctcttattctatcttttatttactttggtcgtattgctggttggattacgttaattagcataattgtaatgcgtatcttttacacaggagggtactgggaacctcctgtgattgcttatttaggtatggggattctattttctacctttaaaacttattttaaaaaactacatccttttaaaagtgcatcgttatatttttctgtttttattggaataaagtggttagttggcgtattatttaatactacattactttacacaggaggcttattatatatagcgttaggacttttaattgggctatttcttatggaagcctaccagagattgtattatttaacacaggacttatctaaaatgaatcgagaattaaaaaaatcgaagcaagaacttgcagataccgtacatgagcttcaaggaggaatttttaaatttaaaaaagtgggtaagcactttatacacactttatgtgatggacagttttattatcaaaacggattttattctgaacaggtggtaggaaaaagcttacgtactattgatgcttctattgttcctccacatttagttccacaattgatgaagtactatcttcaggcatgggaaggaaaagaaattatatttgaattaccttggccaaatgataaaactattattcttattgcgcttaggccgattaaacgaaatggacaagttattgaagttgttggttctacagttgatataaccgaaaggaaaaaggtagaatcagaattaagcgctactaaagaattattggaatcatttataaagcacaatctagatgctattaccatttctgatcgagaagggcatattttacaagcgaataaagcttatgaaaagatatttgggtggtcatcacaagaaatcataggtaaaagattaccttgtgtaccagattttttaatggaagaatcgcttaaaaatattcagaaaattctaacaggagaatctgtggttactagattagaaaccgttagacaaaggagtgatgggagtcttcttgatgttagtctgacagtttctcctatactagatgtaagaggaaatgtgatagctttatcagcaatatgtagagacatctctgaaagaaaacaagcagaaagagaacgacatcgattacaccagcaattaagagatagtgaaatgaagtaccgtgcactaatcgaacaagcaactgatgcggtatatgtagtagagctgaatgaagaaaatgctccaagtcgatttattgaggtaaaccctgttgggtgtagaaggtttggatatagtagagaagagttgctctcattatcattttcaaatatagtaccacaagattctcaaatgatcgtaaggttattagaaaaaattaaaaagggacaaacttccttcactttgcaagatgaatatctttttccaacaggaaaagtaataacaactgagtttagtgttcgtgtttttaacttaaatgggaaaaaagttttcctaagtatttctcgtgatatcactgaacggctaaaaacagaagaattattacgaaaatctgaaaaacttgctgttgtaggacaattagcgactgtaatggctcatgagattaataatccattaactgcaatgaaagggttcatgcaattactaaaatcaacggaaagtgagaataatcagggttatattaatatagtatcatcagagattgagcgtatagagagcattacaactgaatttatggcggtagccaaaccacaggtggtaaaaatgcaacctaataacattagtgtgctaatggatcaagttttaatgctactacaacctcaagcaatgatgaataatataaaaattaaaatcgatcttaaccctggtattccattgatttcatgtgaaggaaatcaattaaagcaagtatttgttaatatattaaaaaatgcaattgaatctatgccgatgggaggagaaattctcattcaattaaatatacttgataataatcaattaagtattcgttttatcgatcaagggtgtggcattccaaaagaacgtataccatacctcggagaacctttttatagtattaaagaagaggggattggcttagggttaatgatctgttataaaatcattgaaacacatcagggaaatgtatttattgagagtgaagtgaataagggaactacagttgaagtcactctccctatttgtacacttcaaaattaatatattttttcactgaaattttttaagaaaccatataaaacgtaatgctattaaacaaaaactgaatagaactttctatcgttgtttacaagaggaaatgacaaacgcaataagacatggaaaagcgagaaacgatacaagtcttgttacaatagcatacaaatcatgtaatacttccaaaacaagattgtctgtatatgtcgaagagttatatccccgatacacttaatcaattaactatagaaactggtggaatgaaacgaaaatgtaagtatcataggaacttatggttaaatcaaaaaatctctactacggctcttactcaactgtgtagtcattttagaaatcataacagggattttattaagcatggagggaattaatcgacactttaacttagcttctgcagctgtctactgttcaaaaaataatttctgtatgttataccaaaaataaagaatgtacttttagaatttataaaaaatataattaggattaaattaaaaccttccaaaaagcctgttataaaaacatcctttctttacaaccaaaagaaaggatgtttttaatattgtaattatgcttgaaaacatttcaaatttttacttgtaattttaatgaaaaatatagtctcgcaggagattagggagaagagaaactattaacaaagaatttcataaacattaagatgctttgttaatagtttttatacctgtagcggtttgtccggtttgataatattaatcagttcttctttataataaaaccatgaagtacacctcttttaaattactacctcaaaatgcaaagtttttggaaataactattttagatgtgagatgaaaatgggggatagatacttagcatttaataaaaaagataagattacgaaatgtaatcttatctttttattaagaataatgaattgtagcttcaaggtttcagaatgacttttatacagtcgtcttcacgattattaaaaatttgataaccgtagctcgcttcttcaagggggattttgtgtgtaataatctcttttggatcaaattctttatttattattttttcaaatagttccggcataaaatgaatgacaggtgcttgtcccattttaagattaatatttctaacccaaaatgccccgagtggaaatgcattataattgccaccataaacgccggtcatttgaaccgttccatattttcttacggctttcgtagctatttgaatagggccgagagttccgccttgtaatttcaatttttgttccagaaattctaaaggcgatttttttccatccatccccacacaatcaataactacatcggcaccaccatgtgtaatttcctttaaatgttctcccatatcggggaattttgtaaactcaaatacctcaacattgttaatcttttttgcataattcatccgataatctaagtaatccactgcaattacacgtttagcaccttgcatccaagcaaatttttgtgtcattaatccaacaggtccacaaccaaggacgataacagtatcacctggctttacgcctgcgtttattacactccaataggctgtaggtaaaacatctgataaaaatagtagggattcatcttcaagctcgcatgattccggtataacaaatggagtaaaattgccaaatggaacttttaaatattctgcttgtccgcctggatgattaccaaatttctccgtataaccaaagtatccaccagaatcgtaatgaggatttgagttatcacattgactttccatttcatgttggcaatagaaacaatgtccacaagaaacgttgaaggggatgacaacacgatcgccttttttcactttagtgacatctggcccgacttcttcaacgattcccattggttcatggccgataatgtatccttgaggtaagggcatgttaccttgatataaatgtaaatcagaaccgcaaatagcggttgaagtaattcttacaataatatcatcttttttctctaactttgcatcatcaacttgtttaacttgtacttgatttggtccttgataggttacagctttcatctcatatctccttttggattatgtctcaaaacataattttatttaatctcttggtgaaatagaaatctttcttttatttactgaagggaattaggaagtatacatagtgttgttatgaaagtatgttatatcagttattctttcttatatgttttgccctactttaagaaaaaaatcaatttttattcataatctaatttccataaaaaggataattattatttcataatttgtagcatattaaaaacatcggaggtgaaataagatggcaaacaataatagtggaagtcgtaatgaattgttagttcgaggtgctgaacaagctcttgatcaaatgaaatatgaaattgcacaagagtttggtgtacaacttggtgcagatacaacagctcgtgcaaacggatctgttggtggtgaaattacaaaacgtttagtagcaatggctgaacaacaacttggtggtagagctaatcgctaagtgaattagtgtaaaatatagcgaatatgtaaatcaatttcttttgtatatgtataaaaataaaaaaccttatagtaaatggattttcactcaaagattattgataatcttctttcataatctttgagtatttaatttgtaaactactttcctaaacaataaacacgcggtgttggaaaggtgttttccatgcatagtagaaaatcttttgcaggaaaaagcatacttaaaaatttgatttcaatattgaaatcaatatttattatgatattttcgaaaggtaggaatttaaaaatgggtatattaagtggaaatcctcaaaatgaaccgttacattacggtgaagtatttgatatttggagctatcttcttgctgcacagggtgcaattgcaagtcatcaagtatttatgaatcacacaggtgatgaagacttgaagaagtttttagaaggcttaattgaaaatgatatgaattcggaaatagaagaattaaaagctcttttaaagattaatggggtcgctttaccgcctgctcctccagaacgaccagttgcatctatcgaagacattcctccgggagcacgtattaatgatgttgaaattgctgctgctgtttctgcaggattagcagctggacttgtgacatgtagtcaggtgatgggaaaatgtcttcgagaagatgtagggatgctatttggccaatttcatatgaaaaaagcgcaggcaggtgtaacgttgctacgtttaagtaagaaaaaaggatgggtagttccacctccattacatgtaagaaattccgatcaagcttaataaacaaaaataaaaagtggcgttggccacttttttattttttagatgtatcctcaagattggatttatttactgtggaagaatccatatattcctctgacatctccatagcatatttatcatggtgaatatgattgcgattttttaattcatcgtcgttacgtagcactagcctcttcatataaatatggaagaaaacttctgttccaccaataattaaagcggctataaatgaagaaagtccaatgttacgagtagcatctaaattagtaaacaaggatgttagtaaccaagttccgaaaaagcttaagccgaaatctgccattgtagcaatcatatttccgtatttaggtaaaatgaagaggtctccgattaaataggcagctcccgtaagaaaaagagaaattaataatactctaggaattgaaatgccttgaaagatactgagcatgattagcaatactgcagttatcgctgtgtatttaattaataaggcaacaatatgtttcatcattttcctccattgtttaaacgtatatggaatacaatatttcattaaaaacggattatgcttttatatagcgtaacccgttttaatcaccccttaatggtaagaagtacaacctgggtaagaagcaggcttatactatggatagtatttgcggaatatcgagctttattcataaagggtagttccattcttataatagagatgttgcctaagtacagtgttttttcatattaaacttaatattcgttggtgttttgattttgcattatattttgattcattaatatgaaaataaacaaagtatttccgcatttaatgcatctttttatctatatattttccgtaatcaggtacagcaattttatcaaattcttgaaccagtgttttgaggttcgttgatagcaattcacctgacattggtatcccatgtccagtaatagcgactagaggctttaattcttctaatttaatgactgattctttagcggctttccagtctgttgttaaataacgaggaggaccgcttatttcctgttcttgagttattactttatacagatactcctgtttcactgtaacaaaagcgtccccagcaattaaagttcggtctttctctcggaataatgaaatatgcccaggagtatgccctggtgtatgaatccatctaaactctggcatatggggaacagttccatcgataggtagtgcttttacgctatttcctaaatcaatcggttcattagggaacaggggagacattttcgctaccataccaccttcaactgttggatctggttcaggatagctttgttgtccagtcaaaaacggtatctccatttgatgggcatagactggaacatcccaatatttaatgagttcaattattcctccaacatgatcaaaatgcccatgagttaaaataattgcttttggacggctatttgtaccaaatcgctcctcagtaacagagataatttcatttgcacatttaggcattccagcgtcaactaaaacaaaatcatcggtatgcggattcccaacaaaacatatgttgacgatttgaatcgtgtagcaaaataaatcaggtaatacttcgatgccgtgaccactttcaattgaagttgctggaataaacttgtaatcacttccataattcatttccttgttcaccttttgtcccccttaatatgtttcaatacgacattatagttccctaatttctcaaatccattttgggggatttgagaaaagaattagtggggattacaaaaaacaaaaattaaggtggagacatatcgatttatataaagtgcaaacagaaaatattgatttcacaagtgtagtttttactattttttgaggaggggttatgagttaataaaaggttcatctgaatattttaacgtaggtttataaagaatacagaacagtttctaatagaaattcattaaatgaggcgattacttgtaccgatgcttttcataatcaaaggatatttaagttttgtgatgtaattgagattgattaaattatgcttttcaatagctattaacagcccgttcagtgatactaatatctcttactatctataatgatatattctattttttatctaactaacgctcttagtgtagctggtgtccttgcattgagtacttcatggtttttattcattttcacatgtttcatccgaaagaaaaacggaaatcccttctttattagagataggaaattccggttcatcttttttataaacagttcaattgtatttcaaattcacatgatgattcggtaaatcaccttggataaagtaggctttattgatagcgaatctgtatttcttgattgattaccgcctattcctcatacatcattttcctcgtcattccaccgtctacgacaaggtttatacctgtaacaaaatcattttcgctggctgttaaatacagacaggctcgtgcaatatcatctggtgttcctacacgctttgataggtgctgttcatgatcaattttacttaattttgaataatctcctgtttcaatccaacctggggaaatagcattcacggtaatcctagcttcgctaaatgaggctgcgagcgcgtgtgtaatagcaacgatcccaccttttgtggcagcataagattctgaatttggctcagacataatcgcccttgtagaggcaatattcacgatagatccaccttctttgttatgacgcatatactttgctgcttcacgtgaacccaagaaaacgcttcttaggtttgtgcttattacatcgtcccattcttctagcgaaatatcgtaaggagacttgaataactcttttcctgcattattaattaaaatatctatctgaccgtatgtttgattagctacttccattaatcgaataatatctgtttccagccttacatctgtttgtacgaaaagtgcttctttaccctgttctttcatcttagtaactgtttttgcacctgctttttcgtctatatctgctaaaataacattggcccctctgcataatgtaaagcaattcctctcccgattccatttccagcccctgttatgatcactaatttattagaaaaatccattgtaattacactccttttaaaaaaatataacgtctttattttttaatataacatacaaaaattatccttctgcataagcaatagttaattgattatgcccgtatttttattcttcactaataaaaggagtaattatctttttttcataagaagataacacaatattcgttgatggcgtaccatattgcattgaatcatcaataaattgttctaaactttctacagaatgtgttgctattttgacaatatagctaatttctcctgctactctgtaacactcaagtacatctggatgattgtagcaaaagttagataatgatttacaatttgttgatttaaacagtataagtgcagaaattggacgatttattttttttagagaaacatgtgcatggtaaccttcaataatttgttgttcctctaactttcgtactcgctcagttactgacggggaagataagtgaaccgcttccgctaaatccttcattgaaatttttgcatttgactgtaatagtcccacgatttttttatcaatttgatccataaattatccaacctttttttataaaatagaataacttaaattctttataaaataaagaaaaacaatcaaatatccttattgaacttatttatcagccttctatacttgtataaaataagggtagaaggaggcggtttacgatatgaaaaagattttattattattagctgacgggtttgaagcagtagaagctagtgtatttacagatgtactaggctggaataaatgggagggagatggatcaaccgaggtcgtaacagttggtcttcggaataaattaacttgtacttggaatttcactgtcataccggaaaaaacggttgatgatattcaattagatgaatttgatgcactagctattccaggaggatttgaagaggctggtttttatcgggatgcatacagtagagaattcttacatgttattcaacatttttatgccaagcagaagcctattgccagtatttgtgttgcatcattaacgcttggaaaaagtggaattcttgtaggtaaaaaagctaccacatacagtcatccgacgagtaaacgaaaagagcagttaaagaatttcggtgcaatagtacaaaatgatttaatagtacaagatggaaatattattacatcatcaaatccaggcacagcttttgatgttgcgtttttattacttgaaaaattaacatctaaaaagaatgctgaacatgtaaaggatcttatgggattttaggcatttatcttcttatgagtttttgatgcttgctagaagtaatgtgaaaagtcgccgtgctgtagttctatttgctgaacccgaggaaaaagaaaaagggtttgattattacaatacttataataggagaatttttatgattataacacttttcacatatattttgttaggtttatctttagcaatacccgcaggtgctatgacagtccaaatgactaaacaaggaatgagaaatggtttcgtacatggttggtttgtaggtataggaggaatgactgtagatttatctttaatcgtcctgatttatctagggttctctagtgtattaaccaatccatgggtagaaacagttatgtggctcctaggttttatatttttaatgtttattggaatagaaagcattaaagaagcaaagtcggaagttaacatagatggagaagatcctaataaatctttattatcagcttatttatctggttttatgattgctatatcaccggctaatattgtattttggataggggtctttggcccggttctagtttcttcattaggtaatgcaagtacatctacatttatattaatagctgtaggtattttattaggtatctttatgcatgatatgatcttattaagctttgttcattttactagacgttttctaaatccaacctttattaaaagagtatctatatttgccgcaatagtcctattcggatttagtggttattttggttacgagtttataaaacaagtaatgacttttatctcaaaagcatagttcttataaacttaaatagggtggttataaggtaaatgaaaaagatacgtattttaaacgtaacataattgtaaatatgttatatcacgtaggcaacccctcaggaattcattgatccctgaggggtctttaaattctttacacgtagcctctactataattgatggtgtatgagcttagctcaatagcgatggggtactacccgcattttaacgaaaatatacgctaagcaaatttcgatataaaagaagccgaattttctactttaagaaactttcggtttcaattcgttatgacattgctctatgttgttatagatatataatttaattaaagtttcaattagtttagatcatcaaaaataatgtcttttttatctaaatttcttagaacttatatatgagatgaatattaatttataagcattaaatatttgtgaagatttaattgacgaacatattttttgacttttattgaaagtggattacactataaaaattttagagaatggctatctatataaaaattacataacagtagctaatataaatccattaaataagacgattacttgtacggatgcttttcataatcaaagaatgtttaagtttggagatgtaattgaagtggattagagggggagaaataaaaatagttatctcttcctaacttaattatatcatgtaaatcaagttcgaaatagactgtttattcgtattgactcctgctacaatcaagaacacatgcatagtaaggagagatgttatatgagttctttcgttctcgattttcaggaaatagaaaacacgcagctttcgctcgtcggtggaaaaggtttgaatttaggggagttaacaaacattcaaggtatacaagtacccgaaggtttttgtgttacaacggtaggatatgaaaaggctatcgagcaaaatgaagagcttcaggctttgttgcagcaactaacaaagttgaaaatggaagagcgagctcaaattggtgaaatgagtaagaagattagagaagtaattatggcagtagaaatcccttctgatgtagtggaagcagtaactcattatctctcacgttttggaaatgaacatgcgtatgccgtgcgttctagtgcgacggctgaagatttaccgtatgcttcatttgcaggtcaacaagatacgtatttaaatattatcggagaagaagcgattttacagcatgtaagaaagtgctgggggtctttatttacagagcgagcagttacgtaccgcatgcaaaatggttttgaacataatcaagtttctatatgtgttgtcgttcaaaaaatggttttccctgaggcttcgggtattttatttacggctgatccgattacttcaaataggaaggtgttgtcaatcgatgccagctttggacttggcgaggcgctagtatctggattagtttctgccgataattataaggtaaaagaagatgaaatcgtcgaaaaggtcatcgcaatgaaaaaattagccatctatggacgaaaagaaggcggaacagagagaaagaaaattgctcctaatcagcaaaaagttcaaacacttactgaacaacagattttacaactagtacgcatcggaagacaaatcgaagcttattttggttgtccgcaagatattgaatggtgcttagttgatgatacaatttatatagtccaaagtcgccccattacgactttatatccaattcctgaagaaaatgatgagggaaatcatgtgtatatatcggttggccatcaacaaatgatgaccgatgcgatgaaaccattaggtttatcttttttcctgttaacgactagtgcccctatgcgtaaagcgggaggcaggttatttgtcgatgctacgcaacaattagctttacctgctagcagagattacttaataaacactttaggaaaatcggatctactcgtaagagatgcattaacgactatagttaagcgagataattttattaaattattaccagatgatgaaaaagggaagagtgttggtaaaagtgtgccacctgcaaattctcaaccggaaattgaaaatgatccggcaatcgttacaaatttaatacagaatagtcaagcatcacttgaagagttaaaacaaaatatgcaactgaaatcaggagtggacgtacttgattttattttggaagatattcagcaattaaagaaagtattgtttaacccgcaaagtatcgctgtcattatggctggtatgaatgcttcaacatggataaatgaaaagatggagcaatggttaggtgaaaaaaatgcagcagacacgctttctcaatccgtacaaaataatattacatctgaaatgggtttagcattaatggatgtcgctgatgtgattcggccgtacaaagaagttattacgtatttacaacatgtagaagatgatagctttttaaatgaactagttcagtttaagggtggagaagaagctcgagatgctattctaacttttctaaataaatacggaatgagatgtagcggagaaatagatattacgaaaacgcgctggagtgaaaagccaactacaattatcccgatgattttaaataatataagagattttgaatatggtgcgagtaagcggaaatttgaagaaggactgcaagaagctttgaaaaaagaagaagagttagtagatcgattacagcacttatcggatggaaaacaaaaagtagaagaaacgaagcgaatgattcgtaatatccgtaattttatcggctatcgtgaatatccaaaatacggtatgattaatcgttatttcatatataagcaagcgttactgaaagaagctgagcaacttgtgcagagcggtgtcattcgtgaagtggatgatatatactatttaacttttgaagaacttcacgaagtagtctgcacgaataaactagattacgaactgatacaaaaacaaaaaaatgattacaaattatatgaaaaactaacgcctcctcgtataatgacgtctgatggagaaatcattacaggtaaatataaacgagaaaacctcccagatgatgcgattgtaggtttgcctgtttcttcaggagtgattgaggggagagctcgcgttattttaaacatggaagaagcgaatttagaagagggcgatatattagttacagcttttactgatccgggctggacaccattgtttgtgtctataaaagggttagtcactgaagttggcggacttatgacgcacggagcagtaattgcacgtgaatatggattaccggcagtcgttggagtagagaatgctacgaaattaataaaagacggacaacgaattcgggtacatggaacagaagggtatattgaagtgttgtaatgaaataaaagaacatccgctattatagtggatgttcttttattatatagctgacttatttctttaagccagccgcataaaaaggtccatgaactgcgattgttgataaaaagcgagcaatctcctcaggtgtttctttttgtccattatttaaccattgttggatgacacctatatgcgcagatgccatataagaagttaagtattcgcttggaacaagtaaattctccttattaatgagaggaccattcgtatcttcaaataatgttttccacataaagtctttcagttttgtttggaaagataaatctcctttcggacttagtacagctctcataaaatcactattttcatttagaaatgcaagaatagaagtgataagtataaatggcattgttggagaaggatttgatccaaggtcagcaataacttctgggaatttctgtttagcaatgttagaaaactcgtacataatgtcttcttggcattttgtcattaaatcaaatttatcttgatagtgcgcatagaaagtaccgcgattaatgtttgctttcgttgtaatatctttcactgtaatggcgtcaaaacctttttcttcaattagctccaccaatgcatttcgtatggcagtttttgtacgaacaacacgcaaatctaaattattatcgcgcaaagcatatccctccttaattttactcaacacatttagaaaatgtgtcttataaccaacacattcacgatttttgattattgtataaggttcaactcgaacatataattcaaaatataaataaacaacacgttgttggttattatagatcaaattaagggaggagaaaagaaaatgtttaaaaataaacttttattgttatcaccagttattgcactacttgttgtttttattttttcattaacgttatttccaactgttcaaccaaagccgaaaaacttgccaattgcaattgtaaatgaggatcaaggtgtagaaattccaaatcaaccgaaaatgaatatggggcaaacgatcgttgataacatgaaaaaaacagcgaaatcagaggaagaacccgcagtgaagtgggtagaagtaaaaaataaagaagccgttcaaaagggattaaacaataaagagtattacgcggcattagtcatcccgaaagaatttagcgcaaaacaagcgtcgttacgaacaccacagccatcttcacctgagatagaaatatatattaatcaaggaatgaatacggctgcatcaactatggcaggacaaatattacaggcgattgttgataatatgaacaatactgttcgcgcgcaagtattagaaggatataaggaaaaaggaggtacattaacaacagatcaagctgcgaaattagtaacacctattgtaaagaacgtgaaaaatatgaatgaggtcggcaaaaatagtgcgaacggtaactcaccaatatcattgttccagccgttatggattgcaagtttagctagtgcagcgattatttttattgcgattagtaaaatgccagtaagctcaagaaaagaaaactttctgttaaaagtaaaccaaatcgtaacaggagctattgcgacacttgtaattggatttggtcttacatggattgcggatgggatggtagggttaaatatttcgaacttcacggatacagctctattcttatccattacttcttttagtttcttcttaatgatatctgcggtactttcattggttgggctaaaaggaatcggtttattcgctttattactattcttcggggcgccgttactatcgttagcacctgagatgttgtctccgttttatcaagactgggtttactcatggttaccaatgaaatttatgattgaaggcttaagagaaatcttcttcttcggaaaaggattaagctggaatacacctgttactgtactcgtttggattggtatagtaagtatggttactatattagcaactgcattcaaacgtagtgcagtaaaagggtataaaacagaattgaacgcttaaaaaaaagccgtttcactaattgaagtgcaccccaattgttagacacagtctaacaattggaggtgcattttttataaataccctatagaatagacttttttcaagtgtctattctatagggtacattttagtgaaagcctcttcctttttagcattttaatttgttttttgttctttaatagacttcactaatttcatcatttccgctcgtatatcttctctttttacatttaatttttcggcaatttgtttaatgtccattccatcttttttcatttttaatacatcatcaagaggggtattgcttttttgagagatgattgttaacacagtaagatgacgcaatttgatgttatattctttcattttttgctttagctgatcaggtgtggatttttgcatagttgctaactgttgtagcagtgcttgctttgtttctttattcatatgatgctttttcagcttacttggatctacaccgaaatgctcggctgttttctcccaagatttattttgcttatagtaagctaaaacatcttttatttctttattactaattcttgcaatatgagcagctttccaaatttcatgtttgttatagccgagtttttctagcgattgcatttcttcttctggaattggtttatggtgatgcattgttacttcttttggtgtggcagcggatgtagggaaggtggatatcccgcataataatgctgccatagtcatacaaacagcgatttttttgtacatgtaaactcctcctagatggataatgtagaaaactgtacatatatcatttccataaaatgtgaaatacttgtgaacaaatcaagtttttttattcacagtatgaaatgacgtttttagaagttttccaacataaaacattgattaatagtaaaaaactaaggtataatcgaaattgaaaatcaatatcaatgatgacgataaacttatacatatagataaaaataagggagagataaatatgactacatatacttccatcgctaatgtgattaaagaaagacgctctgttcgtacatttacagacaaagcagtagaaaaagatttattaattgaactattaaacgatgcaacatgggcaccaaatcataagcaccgtgaaccatggaattgtaaactatacatcggagaaggccgcaagaaattagtagatgcagtattaaactcttttacggaagaagaaagagcgaaacgcggtaaaattttatcagatcgttttttaagcacgcctgcacaaatcgttgtatatataaatgaagatccgcgtcaaattcaacgtgatgaagattatgctgcaacatgtgcattcatgcaaaacttccaacttcttgcttgggaacgcggattaggttgcgtttggaaatcaggcggattaaactacaatccattatttatagaaggaatcggtttaacaagaggccaacgtatcgttggaattcttcatatcggctatttcgataaagcgccagaaggaaaagcacgtactccgattacggagaagatggagattattgaaggttaatagatgagacattctcgtttttgcgggggtgtctttttattatgcaatcaatcctcatgaaagcttgttcttcatcatacactttcttaagggaaagtgtaaggagggaaaataatgagagcaagtgacgataaagcactgcaatatgcgattgcggaaattacggaaattgcgactggatttgggcttgatttttatccgatgcgttatgaaatatgtccagcggaaattatttatacatttggtgcatatgggatgccgacaaggttttcacattggagttttggaaaacaatttttcagaatgaaattacaatacgatttaggacttagtaaaatatacgaactcgttattaactctgatccatgttacgcctttttattagatacgaactctttaattcaaaacaaattaattgtagcgcacgttttagcacactgtgacttcttcaaaaataatattcgtttttcaaatacgaagcgagatatggtagagagtatggccgcaacagcggaccgtgtgaaagcttatgagcataagtatggaaaagcagaggtagaaacatttttagatgccgtacttgccattcaagagcatattgatccgtcgcttatgcgtccgaagctcgcatggagtattgatgatttagaagaggaagaagtagaaaagaaaaaggtatcgcaatacgatgatttatggaatttagataaccgaaataaaaaacaagagcgctctaatatacgtaaaaagaagaaaatcccaccgcaaccagagaaggatttacttctctttattgaagaatatagccgtgagttagaagattggcagcgtgatatattaacgatgatgcgcgaagaaatgttatatttttggccgcagcttgaaacgaaaatcatgaacgaaggctgggcatcctactggcatcaacgcatacttcgtgaaatggacttaacctctgatgaagcaattgaatttgcgaaactaaatgcaggtgtcgttcagccatcaaaaacaagtattaatccatactacctcggtattaaaatctttgaagatattgaagaacggtacaacaatccgactgaagaaatgaaacgacgaggcgtaaaaccaggatctggccgtgacaaaatctttgaagtacgcgaaatcgaatgggatgtatcgtttttaagaaactacttaaacaaagatctcgtaatgagagaagatatgtacttattccagcgccagggaaaagaatataaagtaatagataaagagtgggaacatgtacgtgatcagctcgtaaatatgcgtacaaatggtggattcccgtatttagtagtagaagatggagactacttaaagaacggagaattgtacattaaacatagttacgaaggaattgagctcgatttaaaatatttagaaaaagtattaccatatcttcatcagctgtggggaagaacggtgcatatggagtcgattgtggagagtaagggtgttgtgttttcttatgatgggaagatggtgcatcggaagtatgtgtgaggggaagaacggacataggatactgtgtccgttctttttatttggaaccaagttaaatatgctattcttgaaaaaagggagttatatagagaaatggagtgatttaaatgagcaaaataggggtatgtaaggttgatattacgccgcctgtaggtattgattttgtcggatatcatagagagacaggaataaataatattgaagagcgtatttatgggacagtttttgtatttgaaaaagatgaaatgaaaactgtgtttataagtatcgataatattgggatgttagtagaagatacgaatatgattcgtgagcgagtagcaagtagccttcatgtgccatttgagcgaataacggttgtttatactcatacgcattccggtccagagacagtcggtgatgatccgctagtgcagtcgtataaaatgattttagtaaataatgtagtacatggtgctgttactgcaaataacaatttaaagcgatgcgaagttggatggggtgttacgacaggtgatatcggtgtaaaccgacgagagagaacatctgatggaaaagcaaagatgggaacaaatatagatggtgttgtcgataaacgaattggcatgttagcaataagagatgctgaaacgaaggagttatctggggttttagtgttttgtactgcgcatccgaatgttttaaaaggtgatagtgatgaattatcaacggattatcctggaatgacgagagagattctagagaagttagtgaactgtcctattattatcgttcaaggtgccgctggaaatgtgaatgcgaaatatcgcggttcaagggaagcgttaaaacaaatggcttacatacttagtggacatgtattaacgatgttaccaacagttacatatagtccaattgtaaaattaaggacagtttcaagtatgatgcaaatgaagttgaaggatattcctgaaattgatgagatacgaagcatggctcgattagccgagaagcagtggggcgtgaatacggatgaatggcttgctatcgtattagagaaatataggcaaggtattcggaagttacgtatagatttagaagttcaactgtttcaagttaatgatggtatgttttcaggtataccgatggaacctttttcagaaactgccttagcaatgaaagagagccttcaaaatgaattggctttctttggtggatatatgaacggatatcttggttatttaccgacaaaagacgaatatgcatatggcggatatgaagtagaattaagtcctattgtgtatggaacagttacaaatttgttaatgccaccgggagagaatactgcggagttgattgtgaaaaaggttatggatttatgtaatagggtgaaactttaatgagacagatttttgaacgcagagtaaagaatatgactcattgtttgattttgttaagtcaatgtaattaataatgataatcattattaattacattgacttctaaaaaaagaaaaactagaatttataaagggatcttcaattgttcgctatcatttgtataggaggtaagttatgttggatagctttatttctataagatgtaggttggctctttatagttttggtgttctttttatctttttttgtacagtatttttggtgaatcagaaggtgtatgcagaagatgtaccgtggacatcagtttcaaatgagggagaacgtgtactttttcaagaacaatctttgtatagtaatgatcgaaggggagaagatcttgtttcaccttcatttgaagggcgtaaacatggtggggaagattggggatacttattaagagacagtaattttaattatccatctaatatccttacacattctgtaataggaagagatgatcgaattagagttactaatacaactttgtatccttatagggctatagtacacttagtaattcaatttaatggacaagaggtttatgggtgtacaggagcgctaattagtaaagatacagtatttacagctgggcactgtgtttacaataaaaagcttggtggatgggcaaaaaatgttattgtgactcctggtagaaatggagaccaagcaccgtatttgccttatagttggacaaagctttattcagtaagtggatggactgatgatggagattcggaatttgattatggagccattaaattaaatggatctcctggagattatacaggttggttaggatatagaactactaatgtagagtctccaaagggattactcgcagtagttccagggtatccatgtgataaagtaggaaatgaaaaatatactatgtggacagattatggaccaattgaaggcactagtcctagaattttaacatataggatggacacttatggatgtcaaagtggagcacctgtatatcatgactattctcgtacgggtgtaacaataatagctacccatacagtaggaagtaattcttggaattctggaaaccgggtgacagacgatgtttttaataatcttaaaaaatggtctgaataaatataataagcttttatggattttattttgtgtattggtcataatcgtaatgactagttatatagtaaataatgaaaagaagtttagtaaggttgttaattctgtaacttttcacgtgaaaaataaagaaaaacagccaataaaagattttgaaattatacttatgaaagacgaatcacctgaacccagtaaagaaattgggatctcaatagggaaaacagacgaagaaggaaaagttatttggaggaatgtgagaaagggaaaatatatcgtatttttgccaaataacgagacgcagatggttatgattaatgatagagatgcaacgaaaaaaataaatatatcattgtagaaaaagagtccattgggattcgttttctcaggttgtggcattaaagaattttacgtggaatggatttaaccttatgtgaagaagctattgattttgaaaatttaaatacaggtgtatttaaattttcaaaacacgtatttatacattggtttaatcgtgcagaaagttatagaactatacgcaaaagaacttggaggtatctaagttcttttttatttgtttcaaatttgtgaaagaaagacatactgattgaaattaaattttttatactctatcatatacccatacaggtataggtttttgtttaatgcatgaggaaattaaataataaataacatggaggtttgaaatatgtctagaaaaattgttgtagtaggcggagttgctggcggggcatcagtagctgcaaggcttcgtcgtttaagtgaggaagatgaaattattatggttgaacgcggtgaatacatttcgttcgcaaactgtggattgccatattatattggcggtgtcattacagaaagacaaaagttattagtacaaactgttgaaaggatgtcaaaacgttttaatttagagatacgtgtattgagtgaagttgtaaagattaataaagaagagaaaacaattacgataaagaatgtaactacagatgaaacatataacgaggaatatgatgttttgattctttcaccaggggcgaaaccaattgttccacctattccgggcattgaagaagcgaaggcgttgtttacgttacgaaatgtacctgatacagatcgtataaaagcgtatattgatgagaagaaaccacgtcatgcgacggttattggtggaggatttattggagtggaaatggttgagaatttaagagaacgcgggattgatgttactcttgtagagatggcgaatcaagtaatgccaccaatcgattatgaaatggcagcatacgtacatgaacatatgagaaatcacaatgttgagcttgttttagaagatggtgtagatgcgttagaagaagacggggctattgtacgtttaaaaagtggctcagttataaaaacagatatgattattttagcaattggtgtacaaccagagagtagtttagcgaaagaggcaggattagcattgggagttagaggaacgataaaggtaaatgagaaatttcaaacatctgacccatatgtatatgcaattggtgatgcgattgaagtgaaagattttgttacagaaatagaaacgatgattcctttagcgtggccagctaatcgtcaaggtcgcatgttagcagatattattcatggtcatacggattctttatataaaggtacgatgggaacttctgtggctaaagtttttgatttaacagttgcttcgactggagtgaatgagaaaatattaaaacgactaaatataccctatgaggtagtacatgtacaggcaaattctcatgcgggatattatccgaatgctacgcctgtgctaataaaattaatttttaataaagaaagcggaaaaatttatggagcgcaggcgttagggcgtgatggtgtagataagcgtattgatgttattgcaacggcaatgaaggcaaacttaactgtaatcgatttgccggatttagaattatcatatgccccgccctattcttctgcaaaagacccagtaaacatggtggggtatgcggcaagtaatatagtagatggttttgtggacacagtgcaatggcatgaaatagatcacattgttaaaaatggtggatatcttattgatgttcgagagcctaatgaactaaaacagggaatgattaaagactctattaatattccgttagatgaattacgtgatcgattggatgaagtgccaatggacaaagaaatatatatcacttgccaacttggtatgagagggtatgttgcagcgcgcatgttaatggaaaaaggatataaggtaaagaacttagatggtggctttaaattatacggaacagtagtaccagaacgtgttgtatattaatattttttcatcttccacttcaaaatttggtggaagatgaaagcctatatagtaaggtttcacttcttgttttgtgaacatataagataaatattaaaaataggggtttacaaaataccctatagggtataatatattgtcataggttataaatagtgacataatggtaatgaggtgattatagaatggaatataatcaagatatgaaaaatagattgaaacgtattgaaggtcaagttcgtggtgtacttcgtatgatggaagaaggaaaagattgccgagaggttattacacagttaacggcatctcgttctgcacttgatcgtacaattggacttgttgttgggacaaatttagagcaatgtttgcgtgagcagtttgaaagcggtaatgcttcaaatgaagagttaattaaagaagctgttcaattacttgtaaaaagccgataatctgtcagacataattgttgacagattttcaaaaacattttaatatacccatacaggtatatgtatataagttgtggaggaatcaattatgagtataaaagtggatatgagtttagattgtaaagggttggcttgtccgatgccgattgtgaaaacgaagaaggagatagaaggattagcaccagggcaagtaattgaagttcaggcaacagataaaggatctacggtagatataaaaagttgggcgggtaaagtaggacatcaatatatcgggacgaaacacgaggataatgtattggtgcattatgttaggaaagcaaacgagcatgaagtgaatgaaattgtgaaatatccacatacaattacgaatgcagaattacagtctatattgtctcatggagaagagagcattgtattagatgttcgcgaagcagcggaatttgcttttggtcatattccatccgccatttcagtaccattaggtgaattaaacagcgcagtattagataagacgaagcaaatttatgttatttgccgaactggtaatcgcagtgatatagcttgccaaatgttgaaagagaaaggttattcaaatgtgaaaaatgtcattccaggtatgttagagtggcaagggaatatagagaaataaatttttttgaataaaaatatacctatgggggtaatagagtgagtgttaaaccgttacaagcaaaagatgtggcagagaaagtgttattcggagagttattcattttagatgttcgtaatgaggcggattatgaagattggaaaattgaagggaaacaagtttcttctattaatagaccttactttgacttgttagatggtgtagatcatattgtaagtgaattacctaaagataaagatgttttagtagtatgtgcaaaagaagggtcttctatatttgtggcagagcaattaacagaggctggattagaaaatatttattatttagctggtggcatgaaggcttggagtgaatatgtaaagcctataaaagttggagatttaaaaaatggtggaagtatgtatcagtttaaccgccttggaaaaggctgtttatcttatatggtcgtttcaaatggtgaagcagcagttattgatgcagtaagaacagttgaagcatatgaagaatttgcgaaagagcatggcgttacgattacgaatgtaatggatacacatttacatgcagaccatatttccggaggacgtaagttagcggaaaaggtaggtggtacgtattggttaccaccaaaagatgcagaggaagttgttttctcatacgaaccgcttgttgaaggatctgttattacggtggggggtactaaaattgtaattgacgcattatactcaccagggcatacgattggaagtacgtcattcattgtagatgattcttatttattatcaggcgatattttatttgtagattcaattgggcgtcctgatcttgctggtaaggctgaagattgggtgagtgatttacgtaatactttgtatagccgatataaagagctatctcaaaatttagttgtgttaccggctcattattcaaaaataagtgaaatgaacgaaagtggtatcgttagtgcaaaattaaaagatttatttgagcataatgcaggattaaatattgaggatgagggagagttccgtaaagttgtaacagaaaacttaccacctcagccaaatgcatatgaagaaattcgtcaaacgaatatggggaaaattcatccgagtgtggaagaagagcgtgaaatggagattggcccaaatcgttgtgcagtgcatgagtcattataaaaataacaaattggaggaattgatgatgaatataaaacaagtattagatgcgaaaggtttagcatgtccaatgccgattgtaagaacgaagaaagcgatggatactttgcaaactggagaagtgttagaagtgcatgtaacggataaaggatcagttaaggatattccagcgtgggcaaataaaggtggtcatgaaatcgtaaagcatgtagaagaagctgatgtgctgaaattttggattaagaaggcgtagtaaagaaataattttataaatgtagagggggagttatatgaacacaatattaagtacgcttttcatggtacttgctacatggtttgttatttcgcgctttttaccagtgaaaggtgtgcaaaatatcagcggaaaaaaattaaagaatatagtggaaaaaaaggggaaacaacttatcgatgttcgtacagtaggtgaatatagaggaaatcatatgaaaggatttcagaatatcccgttaaatgagttagctagtagagcaggtcagttagataaaaatatggaagtaatcgttatttgccaaagtggaatgagaagtaagcaagctgcaaagatgttgaaaaaactagggtttcagcaagtaataaacgtttcaggtggtatgaatgctttgtgaggagggactttaaaatgaaagaaatgacagcaaaagaattagaagaaaaattgttacgtaaagaagcagtaaatatcgtggacgtacgtgaagtagaagaagtagccgaagggaaaattccagaagcgtgtaatattccactaggactattagagtttcgtatgcatgagttggataaaaagaaggagtatattatcgtttgtcgttctggcggaagaagtgcacgagcagttcagtttttagagagctacggttttcaagcaattaatatggtaggtggtatgttagcatgggaaggtaaagtcgtatagtacagggatacatgatttgagcctttttataaatgataaaatacccctataggtaatcggagggagaacaacatggaacaacagaagaaaacaacaatcgttttatttagcggagattatgataaagcaatggctgcttatattattgcaaatggtgcagcggcgtatgatcaagaggtaactatttttcatactttttggggattaaatgctttaaggaaagatgagcatgtgaaggtaaagaaaacttttatagaaaaagtgtttggaaaaatgatgccacgcggtgcggataagatgggattatcaaaaatgaattttgcaggtatgggaccaaagatgattaaaggtattatgaaaaaacataatgcgatgcctttaccagatttaatcgatttggcgaaagaacaggggattaaacttgtcgcttgtcaaatgacagtagatttattagggttaaaagaggaagagattatggaaggggtagagtttgcaggagtaggagcttatttagcagatgcttcggatgggaatgtaaacttattcatttaattcatcttctttctagaagggaggggatgtaagatgagcttagtcgtattactttttataattggatttataggatcgtttatatcaggaatggttggaattggcggtgcgattattaattatccgatgatcttatacattccggtattgctaggattttctggctatacatcacatgaagtgagcggtattacagcggtacaagtattctttgcaacttttgcaggcgcttgggcataccggaaaagtaatgacatgaataaaacgttagttatgtatatgggagctagtatattaataggaagcttcatagggagtttcggtgctaacatattagaggaacatacagtcaatgttgtttatgcagcattagctacaattgcagctattatgatgtttgtaccgaaacaaaataatagtggagatgtgaagtataataaatggttagcaagcttgttagcgttcgttgtagggggagcttcaggcattataggagctggaggttcgttccttttagttcccattatgctagttattttaaaattaccactgcgcatgacgatcgcaacatctatcgctattacgtttatttcctcaatagggattactacaggaaaaatggttactgggcaagtagttatcattccagctctaattattgcggttgccagtatatttgctgcgccacttggagcacgagtcgggaagaggctaaatcaaaaagtactgcaatatgtattgtccactttaattgtaggcactgctgttaaaatgtggatcgatatgatatcaaaataaaaggatggtgctgcttacagcccatccttttatttattgcccgtaaacctaacggattatagttttactttatgcccaaataactttcattaagtttttatattcgtcatttgctaatttatatagcattctcgtatgttcaaagacaagtgctggattaaagtttggttctgagaatgcaagagatgttgaaatatcaattgcattttgcttatttaatgtgaattttgcaaagcgataagatgtatttaattcattgatgacatgtaaaatatcatttgttgatgttgcatcaggcacgtgagcaacattgaagcagtatatatccaccgtaggatgttcgttttggaaagcagcgataagttgaatctttgcgccagcttcagtctctaatcctactgaaaaatgaacagagccatcattttcatctatattttcttccatgtatatatcgttagattttaagtagtctttaaaatctgagatgttatgttttactgcagctttcatatgtatgagccccctgataattggaatagattgctactatttattataatttaaaaatattaaaaaagatagttagaaagttctgatttttatatttggaagaataaaaagaagcggttctctacctccatagagaaccgcttctatattattcattgtcattagacgatgtttctgtatcttcactgctatttttgttcttatttttcacttcattgttatttgattcgcgttcacttgaattttcagacttagattcttttgtctttttcgaatcagagtttgagtcagactttgtatatgcaggtagcccaagatgagtacgaagttcatttgtaacattagctaattcttttttatctggattgtagtagtaagttcgaccaccaccagcagatttgctacaagtatcgtcaccttttgccatatagcaatcatcaccttggatttgtaatttctcaatttccgaatccgatccatatttatagaatgaaagcatatcatcaaatgttaagtttgtaacgaattgtccgttaatatcatcaatgatgttgccaacttttgttacagaaccaacacttgttagtttctttaaaatagcttcgataacgagttgttgacgttgtccacgcattgcatcactatcgatgtgtcttgttctagcaagagcaagagcttcttcgccatttaacttttgaacacctttttctaggtgaattgcctctgcattatcattgctatcttgctcagtaaattcaactggtacatcaacttcaacaccgcccaagtcatcgacgatttttataaatgatttaaagttgaattttacaaaataatcgacaggaacattcattaatttttcaactgcatcaatgcttgcttgtggtccaccattttttccgtttttagcagaaccgaatgcatgagcgtgtgtaattttatcttttttcttttctattggaatataagtatatgtgtcacgtgggatacttaatagtttaacagttttgctatctttattaaaagttgcaagtaaaagcgcatctgttcttatagcgtcaccatattcttttcctcggacatcgctttcatcaacacccattattaaaacagagacattgttcgtaataggtttaacagctttatcacgtaaatcagatttatcaccgcgtgctaaatcgtgtgcggcatttcgaacagcagaagatgctttatttactaaaaaccaagtataaccgccgcctattaataaaacgaatagtatagcgcttataataacttttatttttttcttattttttttcgggttactgcgtgtattttcttgcaaagatgggttttgctccatttcctgtactccttcatttggattgaaatacgacactcatatccacttattataatgaaatttagcgaaaaaaaacattacaaatcatttacatttcgtaaaaattcaatttatttataaaaagtcagattttctatatattatttgtcagatgtagaataagtataagggcttttagtagaaatgaaaatatatattatgagaaagtgatagggaagtaagatttgttgaaatatagccaagaagaaatgagtaagcttacttattttttctatataataaggaagaatttgacggataaaggagagagcataatgaatcatacattattccgagcaatcgttgtgaatgaaacggaaaatcatcagtttgtaagtaaagttgttgagagagaagtaagtagtttacctgagggagacgtaatcatacaagttcattattcttcattaaattataaagatgctctttcagctactggtaataaaggtgttacgagaacatatcctcatacgccgggaattgatgctgcaggagaagttgtgagtagtgaagataactcttttaaggtaggagatcaagttattgtaacgggatatgacttaggtatgaatacctctggtggtttcggagaatatattcgcgtgccatcatcttgggtcgtgcctttaccagaaggaatgtcattaaaggaaagtatgatgtatgggacagcaggttttactgcggctttgtcggtatataagcttattggagcaggaatcaagcctaatatgggagatgttttagtaacgggtgctacaggcggcgtagggagtgtagctgttagtatattaagtaagttagggtttaacgtagtaggagcgacaggaaaaatggaagagaaagatatgctactacgtctaggagcgaaaaaagtgattcatcgcgcggaattgaatgatgaatcaagaagaccgatgttaaaagggatatacgccggagttattgatactgtaggtggacgtatgttagaaacagctttaaaaacagtaaagtatggtggttgtgtaacgacatgcggtaatgtggcaggtcaggaactacaaacaacggtatatccgtttattttacggggcataagccttttaggggtagattccgtgcaatgtccagtagatgtgagaagagatgtttggacgcttttagcgaatgaatggggaaataaagagttactgtcttatatagaagaatgtacattagaagaattagagaagaagtttacacttatattgcaaggaaagttaaaaggaagaacagttgttaaaatataatgaaaaaagagacgcttacgttagcgtctctttcttattataatgattgttttaaattgatttttccttgttcacctaaaacaccgtcagcgatatttacagcgtgatcgccaatgcgctctaagttacttaccatatcgacgaagatgatacttgcatcacctgaacagctgcgttcgtttagacgtaatacgtgacgtttacgaagaacacgttccatttggtcgattttgcgttcttttgcaataacagtttgagctagttcagtatcgaagtttgttaaagcttcaactgagtcttgcagtgttgaaattgttaactcaagcatttcgtttaattcagctaatgcttcatctgatagtgaaacacggtttgaaatttggaaatctacaagttctacaaggttttctacatgatcaccgacacgttcaatatctccaacaacacctgctaaaacagaatgtttttcagaatccgtaggtgaaagtggcttttctgatagtaaaactaaatactcggtaatttttttatctaaattgttaatagctccttctaattgagtagccatgtttgcgtgttttttgtcttgtgtatttaaaaattgatttgcttcttttaatccatgtaatgagaactcagccatacggataatctctttttgagcttcagttaaagcgatggctggagattgttcaataaagattggatttaaatgttgtggtttgaagtcaatcgctgcatcttcaccacgaataatttttgttacgatccatgctaacactgcaatgaacgggaattgaatgattgtatttgttacgttaaatgttccgtgtgcaaatgcaatagtcatttctggattcaagtttaatgatgtttggaaatattgaattaaacttgtaaatggtactaataaaattgtaaagataattgtaccgataatattaaagataacgtgaactaatgctgcacgtcttgcggcaatagaagtaccgattgctgctaatacagctgtaattgttgtaccgatgttatcaccgaataatacaggaagagctgcttgtaaatcgattgccccttgaccgaatagttcttgtaaaataccaatagttgcacttgaactttgtacaattaaagtaaagactgtaccaacaacaattcctaaaattggattatcactcatgctaactgttaattcttggaatgattctaaagaacgaagaggtttcatacctgcgctcattaattctaaaccgaagaataacataccaaaaccgaatacaacttgacctacagaatgtacttttttatttttaaagaagaatagtaagattgctccaattgccataactgggagagcatattctccgattttaattccgataataaatgcagtaactgtcgtaccgatgtttgcacccataataacaccgattgcttgtcttaatgtcataaatccggcacttacaagtccgactgttaaagcagttgttcctgaactggattggattaatacagtaactaacatacctgctagtacacccataagtggatttgttgtaaaacgatctagaatatcgcgaagacgatctccagctgcttgttgcagtccatcgcccatgtatttaatcccgaataagaaaatacctaatccaccaatgaactggaagatcatatcttgaacattatattccacgcattccactccttaaatttcatgtacgatgtaattattaactgaaccttgaggcactgtaaacggtttgctagtaaaatttacactaaatttacaaagagaagaaaagtttacaatcccttaaagaaacagctgtgttttattggtttttatcttgtataaatcttaattttgtaaagaaatcacactttttagaataatattgttcagtcgaatattaaggaaagcgtctgcgagttcatcgtatattttttgatgaatgttaaaaaaatatgtaggaaaatgcatgtagttttataacagcaaaacgaggggaaataattcttttaacacgataaaaaagccactgaattatccagcagctttttccgtgtttttatcgccatgcttttgttttcttatgcttgtaatgtaaatgaagagaaaagcaataagtaatagagaggagtaacgatatacagttgcatagtttgtaaaatgagcaataaatccaaatataatcgctccagcgccgattccaaggtcaaatgcggagaagaatgtagccgttgctacgccgcgtcgatgcggtgctacgcggtcaatcatccatgcttgtagtgcaggttggatcgctccaaaaccacttccgtaacatgctgcagcaataattaagctcggaattgtcgtcgtatacgacaataaaataatgcctgtaaaagttataataactcccggaatgatgacgaatgtatggcctttcgcatcatatagctttccagagaatggacgagttacagcgattgctagtgcgttacataaaaagaagagactaatatcagctatgccgacttctgtagcaaatagagtgataaaacttccgattcctccgtacattaatgtaatacataatattaataatgaaggaagtaaagctttacgctcaataaatccatcgagaaaagtactagatgattgttgtggaggctgtttcgatttttggatttgaagtagtttcgttaatattaatgaaacaattgtgcacgataatgcacataaaaaaagaattgtgaagttatatgtttgcataagccatagtccgataagtggaccgagggccattgcaattgttccagaaaggccaaaatatcccatgccttctccgcggcgagctgagggaattaaatcagaaacgacagttccatatgtagtcgttgtaataccgaaaccagctccgtgtaaaatacgaacagcaagcaagagaaagatagttgaggcgaaaaggtaactgcccatagcgagtaaacagatagcagtgccgatcattaaaatgatttttttattgaatttttgcaaggcgttcccagttagcggtctaacaaaaagtgccgcaacggtaaacatgccgacaacaaatccgatattggaacttgtgccaccaatttctttcacataaacaggtaaggttggaattaacatttgaaaccctaaaaacatacataagtttgcaaaaattaaagcaacaaactctttcgtccataacggttctcgttttacgagtattgcttctcccatatattcatcccctatataaagttttctcttttctttcgagtatatgtattggccaatgcaacagtcaaggaaggtgtcttgaaaacggataacaatttttaagatgaaaaactgacaaatttgtgtaaaagctacacaactatgaaaaaaagatgtaaagtatagatgtatagacttgtaggtgttaagaatgatagaaattgttttttctttaaagaaagcggattcaaaagagtagtgaacaagaaggggatatatactttttcactacatatatttgaaaaggtttacaatatgatgaagaaagaggcgtgtacatatgagacgattaggtatttctatttatccagaacattcaacagtagagaaagataaggagtatttaacattagcaagtaaatatggatttacacgtgtgttcacatgtttattatctgtggatggagaaaaagagaaaattatagaagaatttaaagaaacgatctctcatgcgaatgcattagggttccaagtattagttgatattagtccatctgtttttgaacaattaggtatttcgtataatgatttatcattcttccatgaattaggtgcgtacggtattcgtttagatgttggtttctcaggattagaagaatcaattatgacttataatccgtatggtttgaaaattgagattaatatgagcaatggtacgaagtatgtagataacattatgagtcatagaccaaatcgtgaaaatttaattggttgtcataatttttatccgcatcgttattcaggattatcatacgatcatttcattaaatgctcgaaacaatttaaagattacggtatgagaacggcagcttttatttcatcatttgatgcaacatacggaccttggccagtaacagaagggttatgtacattagagcagcatcgtgaattaccgatgacaacacaggcgaagcatttattcgcgactgaattaattgatgatgttattattgcaaacgcatatgcgtcagaagaagaattacaagcactaggtgcattaaataaagagaaacaaacatttgatatagaaatatatgatacaacgacagaactagaaagaattatcgtattagacgaaccacatttttatcgcggagatgtatctgaatatatgattcgttctacacaaagtcgtgtgaaatataaaaaagaagaatttaaacctcataatacgcgcgaaattaagcgtggagatttattaattgataatgaacaatatggccagtataaaggcgaattacaaattgcattaaaagatatggtgaatacaggaaaaacaaatgtagttggtcgaattgtagaagaagagattttcttactagactatttacaagcatgggataaattcggatttacattaaagaaatagagagaatataaaggggaaaaactactgatttcagcagcttttccccctttatatataaagagcgagaggaagagctatgacaaaggtgcatcagcgattaatttctattttagaggaatttttagaagagaaatcgatgttaaatcgagcttttttagcaggccgtttacatgtatcaacgaagacgattcaaaaggatataaaattattaaatgatatattggaagaaaatggagcgaaaatcgaatcgcaaagagggaatgggtacgaattagaaattatacaaaagaagaaatttgaaaacttttgtgtgagtctatttcaaaaacagacggaaaagatcccaacttcttatgaagaaagaatagcgtacattctgcagcgtgttttaatgacagagggatatgtgaagctttcagaattagcggaagagatgtatgtgagcaaatcaacggtcaatttaattatgaaagatgttacagatatatgtggttgctatgaattacaaattgagaagagaccgtattatggtatacgtattgttggagaggaatttaatattcgttcttgtttatcacaatatggtttaccgcgttatgatcatactccgtttcatgagcaatttgagcagacggagacatatttatcgctacctcatatatcactcattcgttcaattatattaaagtatattgaaggcggaacaatatatttatctgatatagaaattgataatttagtcattcatattgcaatcgcattaaagcgttgtcaaagtcaacattatataaaaggaatgcatgcggagcaatcagaacttatactaaagaaagaatatacaattgcgaagcagattttaggagatttagagaaagagttgaaattttcatttccagaagaagaagtattatatgtgacgatgcatttattaagtactgctgttacaacgagagatcgctatgaaaatgtagaagagctattagggaaagatatatatgcatttatgcaacatattctttttaaagtagcggaagaacggaatcttattttttattatgatgaagaattattatttggatttggtattcatttaaaaacgttattaaatcgtttgaagtataagctaaatacgagaaatcctcttttggcagaagtgaaaaagaattatccgtatgcttttgaaattgcggttctcgttggagatatcattggtgaatatacgggtgaatcgatccctgaaagtgaaattggttatattgcaattcacttcggcggagcgatgagccgtttgcaggagcaaaatcaaaagaaaagatgcttattagtttgtgcgactggtcaaggaagtgcacaactattaaaatataaaattttatcacagttccgagataaattagagattgtaggtattacaggctattatcaattgaaagtagaagatctttataaagaaaaaatagattgtattattagtacgattcatataccgagtggtttgcctgttccagttataaaagtgaattcaatatttgatgaaaaagagattaaatcgattggtcagcggttgtttacgcatgtgaatactagtgtgcagccttatattaaggaagatttaatctttttaaatcataatgcttctacgaaagaggatgttattcagtttttatgtgagaaagctgctgagaaacgctatgtaccagaaaacttttatgcttctgttatggaaagagaaaatacgtctccgacagcggttgggaattcagttgcaatcccgcatccgatgcagttattaagtgaggaaacttttctgatgttttgcacacttgaaaaggctgttgattggggagataaaaaagtacaagtaattattttatttagtgtaaagcgcaataataatgaagatttgcaaaggctttatgattttttatatgatattatgtctagtcaaactacgatagagaaacttactcagaccgaggtaattgaagattttcaagaaattttattatcattttgaaaaagtatataaaaacttccgttacataacggaagttttttatgtttaattgtatgcgttttcataataagataaaaatatagaaaacatatagcttgggggaatttaaaatggctgatatgcaaactccatttgcgttaattttacatggtggcaatgcgagaagcgcggcgcttgaagcaattgcttttgcaagacaaggagatttcgggaatgccggtgaaaagatgaaacttgctagtgaggaaatttcagcagcacaccgtattcaaacggatttaattcaagaagaggcaagaggaaatcatgcagaaattagtttactgttagtgcacgcacaagatcatttaatgaatgcaattacagtgaaagaactggctgaagaatttattgctcttcataaacgagtagaagagaaagtgaccgtataagatgtacattttattatgttgtgcagcaggtatgtcaacgagtatggtcgtaagaaaaatgcaagaagaggcaaagaaacaggggaagaattataaaattaaggcggttgattcagaacttgtgaaacttgaaataaaggaagcagatgtcgttttaatcggtccacaagtgaaatatttatttccagctgtagagtttcttgcaaattcatacaatataccagttgcgattatagaccaacgagattatggtatgtgtgatggtttgaaagtgcttaagcaagcagaacaattagttttagcataattatatctttttaaatataaacattataatgttataaagtttatttcattcttttatagtagagagaaagaggagggctattgatgaatgggtttatgagttttatggaacaaaagattatgccaacaacgcaaaagattgcaggacaacgacatttattagcaattcgaaacggggttatttctacattaccgttaacgatcgtcggatcatttttcgttatctttttaaatttaccaattgatgcatatatggaatggattgcaccgtttcgccatattttagatattccattccgatttacagtaggactaatggcattatacgcagcgtttggtgtaggggcttcgctcgcgaacttttatcagctcaatcagttaagtgcagggttattatctgtactcgcctttttactagcatcagttgaaccaattcaaattacgaaagctgtaccaggtgttattgatgcagggagatatatttcagtaggaacattaagtgcaacgtctttattcggcgcaattgttacagcattaattgcagtagaaatttatcattttatgattaagcataatatctcgattaaattaccagatagtgtaccaccagcagtttcaaattcgtttgcagcattaattccaacgttagcagttattcttttattctggggcattcgctacggtttgaaattcgatgtaaatacaacaattacatatttaatcgcaccattaaaatcagtattagtaggaaataatttattcggtggtttattaacagtattcttaatcgtgtttttctggtcattcggtatacatggaccagcgattttaggaccaattattcgtccgatgtgggattcagcaattcttgaaaatatggaagtgttcacggctacaggaaatgcacatcagttaccaaacttatttacagagcaattcattcaatggttcgtatggattggcggatcaggctcaacgttagctttagtaattatgtttatgttctctaaatctaagttcctaaaagagttaggtagattatcattcgtaccaggtttattcaatattaacgaaccaattattttcggtgcaccaattgtaatgaacccaatcttaattattccgttcgttattacaccgttagtgacaacgacagtatcatatttcgcagttgtttcaggtatgattccactcatgatggcgaaactgccatttacgatgttagcaccaattgcagcggtgattagtacggactggacaattatggctggtgtacttgtacttgttaactttgttatctcgttcgttatttactatccattcttcaaaatgtatgagaaacaacaattagcaggagaggagaaaacagaatgctcggagcaattatcatcttaattacattcgtggtcggacagtgtattgcccattattcgaaatgggtacaaagtaaatctttattagtgttactactagtatcagttttatttatcggttgttcaatgggtgcatatgtaatgttaggattgcaatcaccgtacgtaattattgtaccgacaattttatgtgcaacgtgtttatctgcaaaatatagatttacgagcatggcattaatacaacgtatgaaggagatgcaaaagcatggagcgtaaattaggaatttcactttacccagaacattcaacgaaagaaaaagatatggcttatatttccgcagcggcacgacacggtttttcaagaatatttacttgtttgttatctgtgaatcgtccgaaagaagaaattgtagctgaatttaaagagattatcaatcacgcaaaagataacaatatggaagttattttagatgtagctccggctgtgtttgatcagcttggtattagttatagcgatttatcattcttcgcggagttaggcgcagacggtattcgtttagatgtaggcttcgacgggttaactgaagcgaaaatgacgaataatccgtacggtttaaaaattgagttaaatgtaagtaacgatattgcgtacttagaaaatattctttcgcatcaagcgaataaatcagctttaattggttgccataatttttatccgcaaaaattcactggtcttccgtatgattatttcattcgctgtagtgaacgctttaaaaaacacggtattcgtacggcagcctttattacatcacatgctgcaaacatcggtccatgggatattaacgacggattatgtacgttagaagagcatcgtaatttaccaattgaagtacaagcgaagcatttatgggcaacagggctaatcgatgatgtcattatcggaaatgcttatgcgagtgaggaagagttagaaaaactaggaaacttaaatcgctacatgttacagctaaaagtgcactttgtaggcgaagtgactgaagtagaaaagagagccacgctgcaagaattacacgtaagacgcggcgacataacagagtatatgatacgttctacagaagtacgtaaaaagtacaaagattatgacttcccagtgcgtgaaagtgtgctgcaggaaagagggcaagttgtaattggaaacaattcatttggtaagtataaaggtgaactgcaaatcattctgaaagaaatgccgatagatgaacggaaaaatatcgtcggtacaattgcggaagaggagttattcttactagattatgtaggagcttggacgcagtttacttgtgtggaatagagaagagaaggagaggatgctgtggcatcctcttttttatgttgaaatagtagtctatcgtatatagaatgcaaagagatagatttgattttgacgggagcgaaggagatggaagagtatatagatggtttattaagggggatggctcatgaagatacagaggttaggcatcgtgcttatgatgaagcaaaagagctagatgacctattaacgtttccttatttacagcagaaggtaaccaaagcaaaaaaaatagcaatgaagaaagatatgtattatgtaatgacgaaacttgctattaatacgaaagagatcagtattgctgattatcttatagattgtttggaatgtgaacaaaacccgactttgttaagtgaactgcttagtaatatttatacattgccagaagtaagtgatacaaataaaattattccgtatatttaccataaaaacgatagtgttcgtttttgggcagtttcttccttaaagttatgtaaatcattagaagcggagagtgctttactaaagttgctggatactcaagaaaataaagatgagattacaaatatttgttataccttgcttgagattggaacaaatcaatcgattctgccgttaacaaagcttttatatagtaatagtgcctatgttcgttcaactgttattgaggtgttagcaaaaatagggggatcggacttacaaatagtttatattgaagctttacaggatagaaatgtgatggtgaaatatgaagctgttcgagctatttatacgtatggcgacgaaatggcaatgagaccaatttgcgaacgtgtgaataaaattgttgctagaagacgtaaaaatgaagtagagcctacggatgaagcagagattatcattgctcttcgtttcttacataagtttgctaatcatgaagaagttttaaagatatttgataaagtgtacaaaaaacgtggaaacttgtttatgtcggagaggaagtggcttcgagataacattacttactttcaagagaaagaaagaatgtaagaatcataaaaaagagccagcctcaaggatgagactgactcttttttactaactagtttaatactttaactgtaactgttttacgtccccagctacttgatgtacctttatctggcattaaaacgtcgattttattacctttaatagctccaccagtatcaccagcgattgctactccgtaaccttcaacccatacttttgaacctaatggaattacacttggatcaactgcaataagtttcatgtttggattagctgttaagttatgacctaaagctgattttacttggtcgcctgctttataaccattttcaagtggatctgctgtgtaagctgttgctacaacttggaactcacgagaagaagattgtgtgtttttctcagtttcttttgcaacaggttgttgtgtagctggtttttgaactttattagccgcttcacgatcagctgcctcttgagccttagctgctttacgagcttcagctgctgcctcttgagctttagctgcttcacgagcttcagcatctgcctgagctttagcttctgcttgagccttagctgcttcttgagctttagccgctgcttgagcttcagctgcttcctgagctttagctgcttcacgagctttagccgcttcttgagctttagtttctgcttgagcttcagcgtctgcctgagctttagcttctgcttgagccttagctgcttcacgagctttagctgcttcctgagctttaacttctgcttgagcttctgccgcttcacgagctttagttgcttcttgagctttagcttttgcttgagtttcagctacttcctgagctttaactgcttcacgaactttagctgtatcttgaacattagtcgttttttcaactttaactactggttgaactttaactggtgctttacctgttaagtaaggaacatgaacataagctgtttttccgttatattcaaattgaatccaatcattctgtacttggtgtgttgtttcaattacatcatcttttttcaacttaccaagaatctctgagtctgtgtttgctccagcacgtacgtttaatacgtttgctgttacgtagtaagtgtcttttgtatagtcagcgcttatgaaagcttctttaccgctattcaattgaacttttgaccaaccattttctgtatgtaaaacatttactttatatccatctaataattttcctacaacttttgattcagtagttgggttttctcgtacgtttagtacgtcagtcgttacgattgtttctgctttagcagatgttgtgaaaatcccaagaccaaaaaccgctgctgttgctatacccataaattttttcataatagcctccattgcatttgttttcgttgacctcattatagcaaccattattttcttatttgcgaaaaacataaaattacaaagctttcgtaacggggcattaatattctgtaacaattccataaatatcctgatagcgcttccttgttgttttttggcgtatcagggcatatgaaacacaaaatgagtagtatttcaattactgtaacgttaataatattacagtaatatttctaggtgatatctatagcgttacgaaagtagcatattttactgtttgaatggaaaattagttataaaacgataatctttttaggcgtgaaaatatataaatgaggtgaaatttaataaaatatcggtataattgttacaaaatcagtcgaagtatggaaaaaattacgccttgattttcgtctgttacatagtatttttgcaataatagaattagataatagccttagtacctataaataatgaagagtattaggatgatagttgtaacgtgaaacatatataatagaagaaactcaattcagtagataaataaaaaacgtaggagtgtaaactcctacgtttttgtttattcatatcgtaaacattcaattggatccagtttggcagctttgttagctggtagtaaaccgaatataataccgattaacatggagatacctactgcaagaagtccaagttcttttgagacaacgagtggccatccagcaaagattgagacgatccaagcgaagaaaataccgagcatgaatccgatgaaaccaccaagtcctgttaaaatacaagattcgattaagaattgtgttaatactttaccacgtgttgcaccaagtgctttacgaataccaatctcacgtgtacgttctgttacagatacgagcatgatgttcattacaccgataccaccaacaagtaaggagatagcagcaataccaccaaataccattttcatcataccgattgattcgtctagttgtttcgtaaattcacctaagtcttgtgcttcgaatttgtgctcaaatttaggagctttcatttcgtttaagacagaaacggcttgtttttctacacttttacgttctgtcggagaggtcattgttaatcttacagagtcatactcatttactcctgaaatgacaggcgcattttcaagtgatgtataaccttcaggcataggcattccaaagtcgtttttcgtttcgtatacaccaactattttatacggctttccttttatatctgtgtattgatttgattcccaaccactactaaataatttgttgaaagcttcttcatttaatataacagcagggattgcttggtttaattcactgtcatttaattcacgaccgtgaactaattttattttcgaatctgtcataaaggcgcctgttccaccttttaaatcaagatttacatcttttgaaccagcagatgcttttactttcatacttacgtctggatacacatctttaacgcctggtacagtttgcagacggtttagcatatcaggtgtgattttggcactatctgttccgtaatcaggattgttgtagtaaatcgttacttcgttatcttttccttggcctaattcttttttaaactttgcgtttgtaccatcacccattgaaatgatagtaataatggcactaataccgataataatacctaacatcgttaaaatagaacgcattttatgagcaaagatagaggaaagggccatgcgtatattttcactcgtattcaaaattaacctctccaatcttggacgatatttccgtcacgaattacaatttgacgtgctgcagcttccccgatttcacggtcatgggtaatcataatgattgttgagccttgtttatttaattcgtaaaagaggtccataatttgtgtgcttgttttcgtatcaagtgctcccgtcggttcatcggctaaaatgaattttgggttatttacgattgcacgtgcaacagcgacacgctgcttttgtccacctgataattcgttcggtaagtgagtagcgcgatcagctaaaccgacttttgttaaagcagctaatgagcgctcgcgtctttcttttttatcgactccagcgtaaataagaggtagttctacattttgaagcgctgtaagtctcggtaataacatgaagttttggaatacgaatccgatctctttattacgtacgtgtgcaagttctgtttcagtcatgtttgaaatattttgaccggctagttcgtacgtacctgtcgtcggtttatctaagcaaccgataatgttcattaatgttgatttaccagaaccagaaggtcccataatagaagtgaattctccttggttcagtgttacgtcaattccgtgtaatatttgaacggactctgcaccattttggaaggatttcgtgatgccttttaagttaatcactgggcgacaacctccataccatcttttaagtctttttcaggtttagagataatttcctctccttttttcactccagaaacttttgcttcgctatcagtctcgaattcaacagtaactgcttgttctttcgccttaccgtcttttacaacgaagacaacatttttgtcaccttttttcacgatactgcttttcggaacaattgtaccagttgcttcgccagatttacttgttacgtaaacgtggaagccgttttgtaattcgtcactattatctaatgtgacagtgaattgatagttagaaacagttttattttcatccatgctctttaatggtgtagaaccgatttctgttacttttcctgtccaagtcttaccagcgacagtttttgatgaaacagttacttcttgcccaactttcatactagcaagctcatattcagaaagttgaccttttaccttaaattgaccagcgtgacgaagagtaaccccgctcatacctgttttttcgtcagcagttttcacaatatcatcaattacgccatcagcaggacttgttacagaaagagtgtttactttctcttttgctgctttaatcatttcatcagctttttcaacttcaaactttttcatttcaagttgtgattctaattgcccaacttcagcttctgatgcttttaatgcttcagcgggaaggcctgcatttttatctttttgtaatttttgtttcgccgcatcaatttgtttttggaacaacgttacttctttttgtgcgattttcttttgcatttctgcttctgttacaccttgtttcgcagtcggatcattgtatttaaatagaagctgaccctttttcacttcatcgccttttttaacagctaattcatatgttccttttgttggatcaaatgaaatagtttcaattccatttggaataacttcgccaccaaatttttgcgcgttttggatttgtttttcagttactttatatccgctatatgccattgctacttctgaaccgccaccagcaaatgcaaagtatgatccagctgcaattccgattgctactacactagtaattaacaccttatttttctttttcatctatttatcaccttttcgttcgttttagtatctacattaagtatagaagaggtgaagaatctgacaaatcgttttagcttacaataaccttacagttttgtaaggtatgaatatgtaaatgtaaggtagaggttgtcctattgtaagcaaatgaattgactcgttgtttctttcttacaataatattgtatgaaggagaggaggaaggaagatggaagcttattttagtacgcatccattaaaaccgtttattccatactcaaggcaacatgccattatattatttattatgttggtggggatattttttctgtatcaataccaagatttattacgtcaaaatgagtggaatataacggttcgatatgcgattgcatttttatttataggtagtgaaattgggcttcatatgtgggagtggaaagcggggatttttgagctagctacttcattaccgtttgagttatgtacaattagtttgttgttagcgtcgattatgattgtaacgaaaagttaccgtatatatgagattgtattttttacgggaattattggtgcatcacaagccattttaacaccaaatttgcaatatgcttttccgcattttcgtttcattgaatattttatcgcgcatgtattgcttatttgggcaccactctttatgacttgggtggaaggctatagaccgaccttgcaatctattaagcgtacgatgatatttttaaacatattgattccgcttgtttcgtttgtgaattacaaaacaggtggtaattatatgtttttagctcataagccagaaacagcttcattactcgatatgttaggaccgcatccttactatattatttcattagaactcgcagcgcttattgggtgttttattttatatatgccgtttgcgaaaagagaaaggcatgcgcataaagaatcactaggatcatagcttagtgattttttgtctttaaaatatttacaattcagaaaattaagaataaaattagggggtaaattatagagagagaagggtgaaaatggtcaaaaaggtatttttgaatgggatggaagtgacgattcaatttcttatttcgattttggggattattattttaggggctctgccgaaattgttttatggatttaagctggatgtatcaaagtacatacagagtttaaaagaagtgtttgtgaacttaatggatatttccaatttgcaatatgtgagaggtaaatttttatttccgcagctgttcgtccattataaagaaacgattattatttttttagctgctttttttatttcattatttgtagcattttgtattgtttatgtaattatgagtagttcaccgcgtatacaacatcgaattaaatcatttctcatcttcctagaatccattccagatatccttcttattttagtatcacaaattttagttgtatggttttttaaacaaacaggttttttaccttttcaaattgcttcaattggaggcgagtcgattagagggttgccaatattgtgtttgagcatcccgactacgattatgtttgtaaaaatggtcgtgcttcgttttgaaaatgaactagaaaaagattatgtactatttgctaaggcgaaagggctggggcgttttcatattttaaatcgtcatattttacgaaatgtgttgcttagtacattattctttgcgaaaacgaatatcttttttatgttatctaatttatatattatagaatggatttttaatacgggtggtatttttatgtttttgaaatcgtatttcggtattagagttgaggttttcatcgttagtgtgcttcttatatatattccgatttttattttatttaaattgtttcattatctcattccggctgcgatgaaggagagattataatatgtggacgtatataaaacgtgataaaagattttggataagcattgggtttcttctcctattagttcttttgagcatcggaaatacgttatggaatgatggacatattagacaagttacattgcaatatgatgtggatgaaaatccacaagtgccaccgtttccaccttcattacaatttttactcgggacagaccggaaagggtatgacctgttacatttagtcattgaaggcgcgaagtggacgattggtatatctattttaattgcggcacttagaatggtaataggtgtgtttttcggtgtcgtactcggaacgtatataaaaagaggattttcaaaaattgaggctttctttgatagttttacagttattccaacagttatgattgcgtatttttttcttcaatctgcaaatgcatttggaagcggagaggagaccacaaccttttttgaaagggcttcgtttcaagtggtattacttgtactgcttgtaatgccagttattgcactgtatgttgcgaaggaagttcgtaaattgcgaacggaagaatttgttgatgccgcgcgcatattaggcggatcgagaagacgtattgttataaaacatctttttccgcatctctatatgacttttatactcgtatttcttcaacagtttacgcagagtcttactattttactgcacttaggattacttgaagtgttctttggtgggactgttacgtttggtggacctataaaagaggtggaatcttatacgcatgaatggtcaggtttaattggagtatactttagatcattaacagtgcatccatggattcctctagtcccaattacatttttcggactaactattttttcaggaaatatgattgtgaaaagtatagaagaggcaatgttgaaagtaaggttaggaggggagagaaagaggaaagatgtagaagaggaacaatctgctttgcagtcaaaagaagagttatttacttttaaacatacgatgtgaagagaaagaagaagcaagcatggatttcatgcttgcttcttttctttattttgtagaaacttcacctgcagcttctgtttgcggaataaagtatccaattataccaccgattattgctggaatgatccagccaattcctaagttataaaaaggaatggtgtgtacgatattagcgataaaatctggtatcatttccacattatcaagtgcatgaatacagctaataatgaatgctgcgatcatcgctccgatgtagacagaaggtttacgtttcgtatatttatcgataaatgatacgaaaattaaaatgattgtaattgggtacaaaataattaatacaggtagtgtgattttaattaataagcttaatcctaagtttgaaataacgaaactaaagatacaaacgtatagcacaagctttttgtatgaaatatttgttagcactgttgtgaagtaatttgcaaatgcacttacaacaccaattgccgttgttaaacaagcgaagataatggcgatacttaataaaacattaccgcttgtcccaaagaattgatacataacagtagctaatagttgaccaccgttttcgaattgccctaagtttccgtttgaagctccgatataaccgagtaagaaataaacaattgttaagaatagagcagcgatacttccgcaaatgattgtatattttgcgatagatttcttctcttgtataccgttttgacgaattgcatttacaacaattgttgatagtacgagagcgccaattgcatctaacgttaaaaatccttcaagaaatcctttgaaaaacgggatgtctttatagtcaccgataggttctgcaaacgttcctggtgaaagaatcgcttttgttgccataattgcaataattacaagtaaaattggcgttaatattttacctatatgatctactagcttggatggatttaatgataagaagtaaacgactgtaaagaaaatcgcactaaaaactaacatagaataccattgatctgggaaaagtggtgcaatcccaatttcataagatacagatccagttcgtggaataacaaatagtgggccgattgaaagataaataatgatagcgaatactgctgcgaattttggatgaacacggctcgctaaagtgttaaaactaccaccagcaagggcaacagcaacgatagcaagtaaagataaaccgacgtctgtaataataaaccctgtaatggaaacccacatattttctccggaagaaagaccgagaaggggcgggaaaatcatattaccagcaccgaagaaaactgcgaatagtaataaactaatcgaaagtatttgcgctggttttaaagttgtatgcatataaagaaaatcctcctaatgagtgtttttgtcgaaaattcaaataatttgtcgagtaactgttattattttaaaggtctgatgactagaaagcaatagggaattttgaaaatattaaaaaataatgcattaaatcgaataaatatactatttatatgtttaataggaaggatttaacttttaacgtaaaaaaacacatatcgctaggatacgtgtattaaaaatatatttttctatcgcgttcttcttttaaaatttcaaccgcttctcggaaacgttgtgaatgaacgatttcacgttcacgtaagaagcgtagactatcatttatatctggatcatcggataagttaatgagccattgatatgttgctcgtgctttttcttcagctgcaatatcctcgtatagatcggcaattggatcacctttagcctgtatataggttgcagtaaatggaacaccagcagcgttatggtaatgaagagcactgtcatgatcagcgtaatgagggtcaagaccagcagctttcatttgttcaggggtcgcatctttcgtcagcttataaaccatcgtagcaatcatttcaaggtgagcaaattcttctgtaccaatatcagtaagtaggccaatgactttatcaggaattgtataacgttgatttaagtaacgtagtgcagcagctaattctccatctgcaccaccgtattgctcgattaataattttgcaagtgcgggattgcaagttcccactttaactgggtattgtaatttcttttcataaatccacatagtttctctcctttatatttgccatggccaaggacctttgctccattcccaaggggcattagaatagctgtttccaaactgttggagtggtccgtatttttcttccatcttttgttttaatactctccgtttataggaaaagtcattaaattgattaatcgcagcggtgtcatctggatgtgtatctaaataaagagtgagttcaactagtacaaagtccagttcttgaagctccagtaaaagtttatagtattcttctggtagcgattgattcacgacagtagtcaccgcccttttttataaggattttcataatagtcataaaaaacaggccataaagtccctttttgtagtgcttcttttggtgtgaattgtggtaagtttggcggttgaaagcctaaaaataaattaggaggagtagaataatatttttttccaataggaggacagggatcgagaggactatgatagggcacgaatgatctcatatatttattcacgaataaacctccttaagtgttcattactacgtattgtattcagacataataggcatttatgacacatataaaaaagtaataggtacggggggaatgaatgtggagaatgtgaaacaattcattgtattggaagtgaaaaacttaaaggaaactttgtatttttacgaagggattttaggaattaaacctagtttagaaagacctcaattagatgtaacaggggtttggtatgatgctgactcaacgagaattagttttattatgaagcgcagtttgggcgggcgtgagaagagtgttacggactcagttgatgttctaacgttttcaatttctaacatagagaatgtaaagaagaggttagtattttataaaatcgcatacacagaaaacaaaagtgagaagagtattgtggtacaagacccggatggatataaacttcaagtgatagagaaggatgaatagacggaggggatttagtggagagaaattatgaagaaagtgcgttgtttgagcatcaattttggttaaaagtacttactgatcatgcacaatttttactggatgcattagctccgaaggaaaaagaggatataaaaaaagctacttactttgttgaaacatttacgaatttgttaaataaagttcggaatgtgaatctgatggcattttcaaaagaggcagaacaagccgctaaggagattcgggcgtttaaattaaatattatacagaagcagttggaagggaaaattacgattcattttacgccaacttttattaatcatatggtaaacgaagtggaagagtatatagcagttttagagtttttgaagaaaggggaagttccgcctgtttttcatgaattacattatcatctcgtttggttaacggatgcggctggtcacgcaggctctatttctggtggattagatcttgttgaaaaaagattaaaagagaaaagcgaagaatttacgaagcattttgaacaattttacttaaaggcagttgaaatgacagggtatttacgaacggagcttcatcattttccagcattaaagaagtttacgaaagatgtttcacttgaattgaaattattttcgcattttttacatgaagtggaagagctcgagttatcgaatgaagtattaagtgtattatcggctagaatggcagatcatatggcaagagaggaatgttactacttattaaaactagctcaatcgtctggacttgaaatgccgaaatgtaatccgctttaaagaaaaagaggtcaattttatttggcctctttttctgttttattgtctctttttatttttgcttgttcaatgcttgcctgtaatgtctccataatattaatgatgttcggagttggagagattgtttcagttttttcctgttgttcaattttattctcgattaattcggtaagggcttctttatattcatctgtatacatttcttgttcaaaaggatttgtaaggtggtggattaaattaattgctgcggtgagttcttgtttttgtataggataattttcgttacttggtaagttaggtgtatttgttatagcgcgaatttcattagggtagtggatggtttgtaacattagtccatcttcaaagttacggataatagctaaatgttgtttttttctaatagaaatatgaataagcccaagtttatttgtacgttcaagagcttcttttaataataaataggatttttcatgtcctggggtaggtcctataaaataagagcgatcataaagaacagaatcaatttcgttattttggacaaaagatataatacgaatggatcgtggttcatgagcttgttgtaattgagctaattctttttcatccataataatatatttatgaggtgcgtattcataggcttttacaatatcgttatcatcaatttcttcatccgtacaatcgggagcgaactttttatatttaataggtgttaagcattctttatggagacttaaaaattttatgtcgttttcttctacggcactgtatagtttaattcctatatttaatagtccaagtgaaagtgcgcctttccagacggtatgcaaatgaaacatctcccttcgttcaaaaatggttatgtatattatgagatagtaagaaatttcctatacgttttttgtttttacggaagggattggaatataaaatatattgacaagccctctgaaatattttaatgtgagtgtataaaattgtgtataaaggggagtaacttattacaataaagtcgtcattacagggagaaaccctcggctttattggcaacgtttcgttgttagtgagacctttaccagcaatggtaaaggcccctttctgtctttttgaggacccttaccatatttggtagggtccttttcgtatacaaagagaggagatataaaaatgaaaaaacttattagtagattaagagttgtatttcatgttcgccgatttgttccattcctatttgacttttttacttcaaaagaggtttcaataaagaagaaaattttatctgttgcttttttagttgggtatgtagcgatgccgctcgatttaattccagacttcctaccgtttatcggtattttagatgatattggagttgtgttatttattttgaaccgaattgtaaaaatggcgccagttcaattacaagaaaagcataacgtaaacgtaggataggagttaaaaatatggagcaaattattttagatataatcgagtttttaaagcagttttcttattttggagttgtgttagcattaacgtttgaatttattccggcagaagtagtgttgcctatggttgggtattgggtatacgagggagatatgaatttttggttggctgtattagcagggacacttggtggaacgacaggacctttaacgttatatgcactcggttattacggtggtcgtccgctattaataaaatacggaaaatacttctttattaaagaagaacaaattcaaaaagcagatgatttctttgagaaatatggaccagttgtagcatttgttggacgctttgtacctggagtgcgaacgcttatttctgttccatgtggtatggcaaaaatgaacatatggaaatttagtatttatacatttgtagcaatgttcccgttaacgactttgtatgtttattttggaatgaaattaggtccacattgggaaaaagcagcggatgttgttggacaatatatgctaccgatattaggaggcgttattcttattgttgctagtatctttgtctataaatatatgaaaaaaagaaacaaaacggaatctatctagtcatttgaatattttttgaaaatagatgaatagtacaggcaaaagactctgggggacatacacatatagggaatataaaagagagaggggaaacaactatgtcttgtgagtgctcagggtcagcattaacttgttgtccagataaaaattatgtgcaagataaagtgtgtagtccgtggtcaggaactgtagtggcgactgctattacgaatgtactgtacaacaataatattaatcaaaatatgattggaacagggtttgttcgatatgacgtcggaccggctccgatcacacttacagttttagatgcagcaggcgctacaattgatacacaaacattaaacccaggaacaagtatagcttttacgtaccgtcgtttcgtaacaattgaagtaactttacctgctgcaacagctggaacatatcaaggggagttttgtataactacacgttatccactttcataatagaaaaggagagggctaagatgtacaattctaacttatcatgctgttccagtaaaacacttgttcaagatcaggtatgtatagattgggctgctactggtgcggtaactgaaacagtgtatacgaataatattacgcaagatttatatgcatcaggttatgtgaaatatgatgtaggtacagctccaattacggtgaattttttagtaggagcgacagtggtgaatacaattactgtacaaccacaaagcagtggatcatttacagtaagatactttactacaattcaaattgtaacaacaggaacgggagtaagccaaggacaattatgtctgacagtacgttatccaatttcataagcaaaagcataccaagtggtatgcttttttatatagtttgtaagttaaggtggtgaagaaatttataagcaaaatgagaattgacaacaatattttccttccatatatcgggttgggttatttggaatatcaatgatagccacagattgtaaggattgacctgtatatgacattgtgttgccaggatagactgtaaaagtatttgtcacctttccgataatttgaacggtaattcctgcagtactactagtactattatacacagaaatggtaccagatattttaactacaccatctccttcccataagattaatgtaggattttcagaaggtggtggaatttcttttgttataagaaaattaccggcaaattcatttgtaattaattcacagcctggtggttctggtggattaggtggatcatagggagggcagatgatagataaaggggcataacagccgatattttttttacaagccattagtagctcctcccttcatactttctttttattactattaaatgttggaaaacgatagttgtgttaataaaggggcgaaaaatttcaggaaagtttgtttaataggcttccaaatcataataatgaataagagtctgttagacacaaggtacttgtataagataatacaagtaatgttggatgttacagaaaaatgactgtatatttacaaaagttaaataaatttcattttcactttaaacgaagttaatatgtgttcgatacaataaccattgtaattaattcattatatgaggaggatttacgtggacagaactgatttacgaaaagtaaaaggccttattggattattgatggtttttgtattagcattcgtatcatttccatggagcacatcagttaaagcagaagagaaaaagcaagaaaaggcatcaagtgagaagaagatagtttttccagttgtaagtgatgtgcatattaaaaatagtggaacggatgatacgtttcgctggaaaagagcgattgaacagtttaatacattagcaccaaagcaagatgcgtttgttattgtaggtgatttcacagatacaggatcagtgcagcaatatgatcgtttcatgcaagtgtataatgaaaatgcaaataaagatgcagtgcgaatgaattctctcggtaaccatgattattggaacggtttatccgtagagggtgcacagaagcgtttcttagaaaaaacaggtatggaatcaatttattatcataaagtggtaaaaggttatcacttccttgttatgtctccagagaatggaacaacacatggttattattcggacaagcaaattaattggttaaaagaagaaatggcaaaagcacaaaaagatgatccagaaaaaccgatttttgtatttttacatcaacatattaaagatacagtgtacggtagtcaggaatggggaacacaagatagcgcaaaaattaatgcagtgttaaaagaatatccacaagttattacgttttcaggtcattcacattatccgttagatgatccgagatcgatacatcaaaaagactttacatcagttggtacatcttcagtaagttatatggaagttgaaggtggtaaagtacaagggaatatcccgccaggagctagtacgttaagccaaggtttattagtagaagtagatgaagaagaagtgacgattaatcgccgtgatttccatacgaattcttggacaggcgagccttggaaaattaaattaccagcaaagaaagaaacatttacacatgtagaagatcgtgataaagaaaagccttactttgctaaagatgcaaagcttgctgtatcaaatgtaacagaaaatgcggcaacagtaacattcccgcaagcattggacaaccttcttgttcactcttaccgtgtgcaggctagagataagcaaacgggtgaaataaaaaataaattgttagcattctcagagttttatcgtgatccagtgccgaaagatcttacgtttacgcttgcagggttagatggcgggaaagcatatacacttgaagtagttgcgattgattcatttggcaatgaaaccgcacagccgttaactgcggaaattactacgaaaaaagataatattgacccgaatgtgaaagtaccaaaagctgatgttttcgatgtaaactttgcagatggtacatttaaagacaattcaccatttggtacaaaaggtgatgtgaagggcaatgtgactattgaatatgataaagcattgaagaagaatgttatgaagttaaacggaaaagcaaatacatttggataccttccattttcagcagcacaaaaagaaaaagtagcaaatacgtttacgttagaaactgtattttcaatgaatgaaattcgcggacaaggcatcttgcaaaatacagagagcggcggaattggatttgagtctacaggaagtggatatgttgaattatgggctcacattggaggtagctataaacgtgttggagttcaattagaagcgaacaaaacgtatcatttaacaggaacgtataacggaagcgaagtggctatttacgtagatggtaaaaaagtaaatagtcagccagctactgggaaagtgtatcatccgaacgtaccatttgcatttggagcggatcctgatagtaacggaaatggtggtattccgttaaatggacaaatcgcgcttgcgaaattatatagtaaagctttaagttcttcagaagtattagcatcatacaatgagttttctaaccgtacgaagttagagcaagtaaatgcgttatttgaagagcttggaaaagtaaaagaagtgttagttagtacgtatgaatttggtgataagccaggtcaatattcaaaggaagcatttcaagaattagagaaaagctataacattgcaaagcaagcatttgaaaatgtaggaagtactggggaacaaattattcaaacatataacgaattaaaatcagctaatgtaacatttgtacaatcaaaagtggcagaagaacaaccaaaaacaacgaaagaaaaattacaaatcaatattgaatctgcaaaagcagtagtgaagaaagcgcaagctgtaaatgtaacagatggttcagtgaaatcattgcaacaaaaaattacagttgcagaagctgtattacaagatgtgcaagtaaaagatgcacaggtagaaacgatgaatcgtacattagagtatgcgatttcacttgttgaaaaaagtatgaacaaataagagagaagaaaagaagcttatcatgataggcttcttttttgttatactaaaagtagcatagaaagagggagcgaataagttggaacagaaaaagctaaaaagaattcttgaatatgtatggatcgcggttgtgctccttgtaggatattatttattaaaagataaaagtatttgggttttattcttaatgacgtttttattagcaggattaggaacgttatttattaacttcttctttgatagtttgaatgcctggaagaagaaaaagaaggggacgaagtaaaggagggaatatatgcaaaagtggaagctcatatatcaggtgattattttcttagtgcttgtgggtattggaatgatcacatactcgacaccaataggaaattgggcatggtttacagcttgcatcggcatatttttcattttacaatcgttaacgaaaaaatatgatagtatagaaagatagctcgccattttatcggcgagctattttgttatgcctttttctgttcatcatttgttttttcaatagctaaatgactatgctttctagagtagaagaaatagaagcataagccgactataagccaaactgcaaagctaatccatgttgttttagacaaattaatcattaaatataagcagcaaagaatcgcgacaactggtagtacaggtacgaaaggtgtgcggaatccgcgttttaagtcagggtgtgtttttcgtaaaataagtactgcgcagcaaacgaatgtaaaggctgttaacgtgccgatgtttactaaattcgctagcaaatgtaagtctaaaaggcctgctaataaagcagcaacaacgccagtaatccacgtatttaataaagggatttttacttttttatttacacgtgctaacgcttttggaagtagaccgtcacggctcattgcatatgaaacgcgaacttgtccatacataacgactaagaggacggttgtcattccagtcatcgctccaacagcgagtagtcctgcaattgcatcttcaccaacgaagtgcaatgcaaatgcaactggatcagaaacgtctaattgtgtataaggaaccatacctgttaaaacgaaagatacaatcatatataaaatagtacaaataagaagagaaccgataataccaattggtaaatcacgctgtggttttttcgtttcttctgcagcggttgcgattgcatcaaaacctaaaaaggcgaaaaacacagtggcagccccagtaataataccgtcgtatccgaatggaatgaacggtgtccaattttcaggttttacatattttgcacctgctacgataaaggcgataataacggctaacttgataagaaccataatattattaatgcgtgcgctttcgcgtataccaaaacttaaaaggccagtaataagaagtaaaatacagacagcaggtaaatcgatgagaccaccttttcctacgccgggggccgaggcgattatggcgggcaggtgtatattgaaaccttgtagtaatgattgtaaataaccagaccaaccgacagctactgctgcaacggcaagtaaatattcgagcattaaacaccatccgacgatgaaggcgacgacttctccgactgtcatatatgcgtaagtatacacacttcctgagacaggaatagaagaagcaaattcagcataacaaaaggctacacaagcacaagtaaatgcagcaataaggaatgatagcataataccaggaccagaatgttttgctgcaacaatacctgttaatacaaagatccctgtcccaattacggcgccgattcctaaaaacgttaaatcgagtgcagttaatgttctatctagttgctttggtgactcagtactaagcgctttttttcgtaataatgacttcactttggactctctcccccgttttttcatttccataactgcgactatagtatgagcccattaaaaaagagtaagtaagtggaggtgcagttatggtatgtagttttttaaaattgctggattaatcttaatataattcagaatattttgtcaaataaaaatatgacaaataaaatgcggatcaataggggaaactacttgcagaaatggacgtgggttaacgacccactgattaaagttaaagtaggagcagatgctatgttattttattttgaacttgtcgtcattttactttgtacgaaattagctggtgacattagtgtgagacttggtcagccttctgtacttggtaagttaattgtcggtattattatcggtccggctgtactcggtattattaatagttctgaactgattgatgaattgagtgagattggtgttttgttacttatgtttatagcgggacttgaaacggatttagaagagttaaatcggaatttgaaatcgtcatttgcagtagcggctggtggaattatttttcctttcatcggtggttatgtaacaggattgctgtttggattaatacaatcccatgccatttttttaggtttattactttgcgcgacatcggttagtattacggtgcagacgctacgtgatttaggaaaaatgaatacgagagaaagtacaacaattttaggtgctgccgtatttgatgatgtcattgtcgttattttattagcatttgtaatgagttttttaggaacacaagatgtgaatataacacttgtcattgtaaagaaaattattttctttgtaagtattgtttttattgcatggaaagtcgttccttggattatgaaaatgcttgtcccgcttcgtgtaacagaagcgttaattagcgcggctcttattatttgcttctctttttcttattacagtgaaatgatgggaattgcaggtattattggagcgtttgcagcgggaattgctatttctcaaacagagtataagcatgaagtggaacataaaattgaaccgattgcttatgcaatatttgttccagtattcttcgtaagtatcggaatggaaattacatttcaaggtattggaagccagctttggttcattattattatgactctcattgcaattttcacaaagttaatcggatcaggtttaggagcgagactgacaggatttaatctccaatcttctattagtattggcgcggggatggtatcacgtggtgaagtagcgcttatcatcgcagcaaatggacttacggcgaatttattagcgaaagaaaatttcacagcgattgttattgttgttatattgacgacgattattacaccaccacttttgaagaaatattttgcatagagaggaagggcttatctgatgtaggtaagctctttttttattcctaaaagcaacgatcatatagcatgaagcgtttgtaattatggtaaaatctatgtatgtgatatgacaaggagagggaagtgtgaagattacgaaggagaaggttattggtgtaatcgtacttattgcagtatgtataccatttactgcatggaaagaatcaaaagtgaaagattttccggtttctattttttcggaagaagcagatggtgagtacggtcagaagctgaaatatactgcttttttacctgatgttgcgatttggatgaacggttgggaaaagaagtggacagaaggggaaagaactgtttatcaaaaagggaatcgcattgtaaatgtgtttcatcctcctggcgatgatggttattaccttcttgaagcaagagaaaataagtgaacgcaaccgtaagaagtggaggttaaatagtgaaagcttcaacattactatttaaaattgaaagtaatatggatcaattttcaccagctgagaagaaggttgccatgtacataatggagaatgcagagattgtaccgaatttaacgacgaaagaagtgtcaacgaatgcaggcgcaagtgaagcgagtgtcgttcgcttttgtaaatcgattggaatcggaagttttaaagcatttaagatagcactcgttcgtgaattaactattgctgattataatattaacgatttttcagtgatgaatacagaagatggaccgtatgatttatttaataaagttacttatgtgaataaagctgcaattgaggcgagtgttactgcaatagataagagagaacttgagaaagctgcagatcgtattgtaaatgccgataaaattatcttttatggagtaggcggatcagctacgccagcaatggacggggcttataaatttacgcggcttggatttacagcgatgatgctatctgattttcatatgatgttgccacttgtgacgaatttaaaagaaggcgatatatttgttgcgatttcaacatctggtcgaacgaaagatgtgcttgaaatggcgcagtatgcaaagagacaaggtgcaactgttattggaattacgaaactagatcaatcatcccccctatataaagaagcggatattcgcctttgtatgccagatgtagaacaagatcatcgtattgcgagtattgcttcgagaatgacgcaactgaatatgattgatgctttatatgtgattactttcaatcggattggtaataaagtattggatcaatttatggagacgcgagaagaagcgttgcggttacggaagttaaagtagaagaaaagatgaggagactcatctttttttatccccctatttgccgggcagtaagaccctcacttcaaaattcagcggaagcaaagaaagttaggtggggatcaactgcccgtaaatgcccgattggtgcgggctaataatcagtggggatgaacaaaacccacactgattaaagtttcactttatgatctttgacaaaaatatgtcatgtcgtgaaattttatttcataaaataagaaagagtaattgatttttagtttcttaaagttataataaaagtgtgaaatataatttcaaagagggtggcaatatgttagaaaatttatcgacagaacatcgtaatgagaaaacaatgaatttggatgagatgagcataaaaggagtgttgcaaagtatgaatgaagaagatcgaactgttgcgttagcagttgaaaaagagatagaacaaattgaaaaggttgtacagactgttattaaatcttttgaagaagagggacgtttaatttacattggtgctggtacgagtggtcgtttaggtattctagatgcagtggaatgtccgccgacatttggcacggatgataaaatggtgcaaggatttatagcaggtggattgaaagcgtttactaaagcggtggaaggtgccgaagatcgcgaagagttagcagaagaagatttaaaaagtattggattaaatgagaaagatacagtgattggaattgctgcaagtggcagaactccttacgtaattggcggcttgaaatacgcacagagtgtaggagcgagtacagcgagtatttcttgtaataaaaatgctgaaataagtaaatatgcaaagttaaatgtggaagtagagacaggtgcagaaatattaacaggatcaacgcgtttaaaagctggtacagcacaaaaattagtgttgaatatgatttcaacagcttcgatgattggtgtaggaaaagtatataaaaacttaatggtagatgttcaatccacaaatgaaaagttagtagaacgatcaaaacgaattattgtggaagcaacaggcgctagttatgaagtagcggcagagtattatgaaaaggcagaacgtaacgtaaaagctgccattgttatggtgttgttgcagtgcgaatatggggaagcactggagaaactaaaatgcgcaaaagggtttgtgaagaaagcactataaaataatagggagggggattctattatgaagaaagaagagagaatggccaaggaaatttcggagcaacttggaggaataaaaaatattcgtagtattgctcattgtatgacgagactacgattaacgcttcatgatgaaagtaaagtaaatatggaccttttaaaaaaagttgaaggcgttatgggtgttatagaagatgagacgcttcaagttgtcgttggtccaggaacagtaaataaagtagcagctgaaatggaaggcttgacaggactacgaattggtgagatagcagatcatcaccttgaagatattgggcaagagatgaaatcagagattaagaagaaaaataatacaccggtgaaaaactttttacgaaaaataggaagtattttcattccgttaattccaggacttgttgcgtcaggaattataaacggggttgctaactttgcgaaaaacgctggtgctgatccaaatgcaacgtggttacaaatgttactactcattggcggcggtatctttacattcttaggaattttagttggttggaatacagcgaaagagttcggcgggacaccggttcttggggcaattgctggcattttaattttcaacccggcgatggcaaacgtaaaattgtttggtgaagcattagtgcccggacggggcggattattcgcagttatttttgcagcatggcttatggttgtagtggaaagacaagttcgaaaagcagtgccgaatgcagttgatattatcgtgacaccactcattactgtattagttgtaagtattgtaacaatgttagccattcagccattagcaggtttcttatcagatggtattacgagcggaattaatgcgattttaaatattggcggagcatttgctggcgcagtacttgcgggaacatttttacctcttgttatggtcggattgcatcacggtttaacaccaattcatatggaatttattaatcaaacacacgtaacacctttattaccagtactagcaatggctggtgctggccaagtgggcgcagcaattgcgatttatgtgaaaacaaaaaacaaacgacttcgaaatgtaattaaaggtggattgccagttggctttttaggaattggtgagccgctattatacggggttacattaccacttgggaaaccgtttattactgcttgtttaggagcggctgtcggtggtgcattccaagcagttatgcaaacagcttctcttggaattggcgtatcagggctatctttaattccgttaattgctgacaataaatatttactatatttcttaggtttagtaattgcatatgctttcggatttatctttacgtacttcttcggatttaaagaagaaatggcagaaaacatatagagaaagggattcctttctctttttctattaatagagagggagatttatatgatcggagtttccatttatctttcaaaagaacgagtagagaaacaaaaagagtggctaaaagtagcgaaggaacatgggtttacatctatttttacatcactgcacattccagaagatgatccaaatacgtataaagagttaattcaaatattagggaaacaagcttttgcacatgaaatggagctaatggttgatgtttctccaaaatcgttacaccatttagggctaacatatgaaaatgtggaagagctattggactggggtattaccggtttaagaatggattacggcattgcgccaaaagaaattgcaagcgtatctcataagatgaaagtagctttaaatgcgagtacgattacaaagtcattttggaaagaattacttacagaacatataagagtagagaatgtagaagcatggcataatttttacccgcgcccagagacaggactagcaaagtccttcttacaaaaacaaaatcaatatttacagaagtgcggaataaagacaatggcatttattccaggagatgcggaaaaacgtggtccgttatatgaagggttaccaacgttagaaaaacatcgcaatatgcgcccgcttgaagcgtacttagaacttgtacaagattgtggtgttgataaagtattgattggagatataagcgcaagtttagaaagtatgcaagaagtagctagtgcaagtagagggattattccattgcgttacaaatcatttataactgataaagaagtattaaaagtggtagagcaagtgcatacaaatagactagatccgtctcgtgatgttattcgatctgtagaatcaagggaaggaaatagagtggtgataaagccgatgcatacaattgtaagaaagaaagggagcattacaattgataatgaattgtacggtagatatgcaggggagatgcaagttgccacatatgatttacctgtagatgagaaagtgaatgttgttggaatggttgtggaagaggacgtttctttgctgccttatattggcgctggaaaaatgtttcaactttttctatgcgatagaataaaagcttgaattagcgctattttgtaagaaaacattatccgtaaaacggataatgttttttgttttatttaaaaaagtatttgacgaatgaaataaaataccgtattgttttgacttgtaaataaaagttcaccataacaaaacaaaaaggagagttcaaaatgaatcaatatattgggaatttaattattcgtatcgtgttaggagttacgttctttgcacatggtttagcaaagtttcaatcaggtatcgataatgtagcagggtggtttacaagcatcggtttaccaggtggccttgcatacggcgtagcaacagttgaattagttggtggtatattattaattatcggtttaggtgtacgatatgtaggattgttattcgctcttattttagctggagctatcgtaaaggtaaatggagcagcaggtttattaggagatggaaagaatccaggatatgaattagatcttgcattattatcaatgggtgcgtatttattcgtagtaaaagcagaaggatatgtagatcgtttcttaaaagagaaagtaatgaaaacgaagtaaattttatttataaatgttgacttgaagaatcattgtaactataatgattacagctaatagattaagagtaaaacaatttaaatgtttttttacacaagatgtaactgtgatggttacgtctcgtgtaaaaataaataaacgggaggaagtaatatgcctaaatcaaatttagaaattattaaaagcacgtatgaaggatcagcttcttcgaatgcaaagcatttagcagaagccctctctgaaaaagtggaatggacagaggcagaaggttttccgtacggcggaacatataaaggcgtagaagctataatggaaaatgtatttagccgtttaggatcagaatgggatgattataaagcaagtgtaaatacatatcatgaagtaaacggaaaagatgtaattattgctgaaggtatgtattctggagtttataaagaaacaggaaaatcatttgaagcagaatttgttcatgtatggcaacttgagaacggaaaaatcgtgaagtttaagcaatatgtagatagtcatattgttagggaagcgatgaagagataatgctttttaaatggatcgtaggtatatgcattacaattatagtaattttctcgtctatagttggcggaaagaaattgcttgcatatgtggaaaaagaaaataaaaatattcaaaccgagcgagcggcaaacgaaaaagagaaaaaagctgcagaagaagctccgcaaattagtgaaggtgaaattatttctactatgcataaaatggtgcaccaaaaggtaaaatcctctgaaaaatggggatttgtagagatgacaaaaaaggaaatttctaatgtaaaaagagatattgaaaatagtacaggttttcaatataaaatgaagttattttctattataaataggtgggaaaaaggagatttttctcaaactgttgaggagcataactttttatggagccttcaaggtggagatactggcaaggcgacggaacgtttatcgccaaaagaggaaaagcagtatataagagaaatgaagagtaaataaaaacatcgccaacctagatgacgatgttttttcattaagaatgttttcgtattaaaggtctagttggctgaacggcaacagttttgaaatgagaaaataaataacatcctgttacaacgacaattgtccctaaaatttgtatccacgttaattcttctccgagaaatatgaatgctaaaatggctgtgaaaattggattgaagtttagaaaaatacctgatgtagttgcgcctaatttttgtacgccaatattccaaaataccatacaaagaactgtcgaaataagcccagtatataaaagtgatgtgatgaaagaagtatttatatttgaaacagtgaagctacctatgttaaacggtagtaataaaataacgccgaaaataccagagtacaacgttgccataagtggtgtagttgtttttgttgcccatttactacaaacagaatagattccccaaatacaaaccgctgcaatcatccataaatcaccgctattaaaatgtagtgaaaataaaagcgagaaatcaccttttaataggacgaggatgaccccgaagaatgaaagaatcatggataggatttgaagtgtatttactttttcttttagaaataatactgaaaataatgcgattgaaattgcattcaatgtagaaataagacctacattcgtagcggatgttttttctaatgctaaaaattgaaagatgttaaaaagagcgactcctgaaattcccattaatattaacggaagtatcgcggtacgtggtggaaggattttcttttctttaaaccataccattggtaataaacaaacaatcgcaatcagccaccttaaacttgtcagtgtcatcggtgatgcatgatcgacgagtgattttccaacgacgaaatttcctccccataataagctcgttagtaatagtaaaaagacgtaaaaataaggcatgataaaatccccttttttgtaatcaatacttattgtaaataattttagcatttttctttattgtgtaatatattcttttgtataatggtgaaaactcgataaaatatttagtttaaaatgatatttacagaaaaatattcagttttatataaattataagttgttttctcgaataatcatcggtaagaaaaaaggaggaattgtaatggagtcgtctgttattaaagtgttggatgatttggatgtacgaattttagatatattgcagaaggattcacaagtaagtaatgcagagctggcacgtcgcgttaatttatcaccggctgcgatgcatgcaagaataaaaaggttagatggggaaggtttcatcgataagcaagttgcgattttaaatcaagaaaagcttgggtttgatttattatgctttatttttatgagtacgaatattcatcaatttgacaagttagaagtgttggagaaagaattagaatcgatgccggaagtgttagaatgtcactgtttaacaggagagtacgattatttattaaaggttgcaaatcgtgatcgtaaagaactagagcagtttattagaaagctgaataagcttggtattacacgtatacagacgagtttggcacttcgtgaaattaaatattcaacagtattaccgatacgagatgaggaaccgagcatcgattagattgcttggttttttgtttgtataaagtgattgacgaggagaaaagagagctgtattattatataaaattatgaattaaaattcatttaaagttataaatattaatattgaggggcaaggggatgtaatatgaaaatctgtaatgcggtgaccagtgatgtgaaagaaatttatagtcttattgaggtttatgcaaaagagggagttgttttaccacgttctcttttgtctctttatcaatatttgcaatgtttatatgttatgaaagaagacgagagaattgttggagttgctggattgcatgtgttaggagaagatcttgcagaaatacgatcgttagtagtttcgcatacatatgcagggaaagggataggacgtatgctcgtaaatcatgtaatggaggaagctacgaaaataaatgtaagaagagtaatttccttaacatatgaaacagtattttttcaaaagtgtggatttgattttataaataaagaagcgttgccagagaaagtatggattgattgtagacattgtccaaagatggattattgtgatgaagtggcgatggttcggtatgttggataaaaaaatttatagagaaaaagttcccactattatttacagatatagtgggaacatgtatttccataagaaatggacaggttattaagaatttgaattcgtttgtcttacggcaaaattataaagtggatctttaagttcatagttatacgttaaaccgtcgacaattcctacaactttatcattatcataaaggtcgagcataaattttgccatttgttttgcagtgtggaatttcggtacaacattatcgtattcgaactcatcaataccaaatgaacgttttgcaaattctgtttcagttgccccaggtgctaaaacctttgcttgcagttttgcgccttgttctttcagttcgtgagacagcccttctgtaaaggcacttacataaaattttgtagcgcaatacgtaacagcatcagcaacaatcgtgtatccgccgcccgatgaaacgttaataagctgtgttccgtcaaccattgaataatctcgaacgaaaagagaagagagtattgttagtgcttctatattgacatgcaacatcgtctcgattttatttaaattttgttcggcaattgaggcgaaattaccaaaacctgcgttattaatccacgtttcaatttgaaaagcttgtaggctttcataaagtttataaacatcttcagtaacagataaatcagttcgtcgaatgacaacatctaactctggatgcatttcgttaattttcaattttaatccatctaattcttcttgtcttcgagctacaagtactaaatttttcccgcgagatgcaaatgctaaagctgcttcataaccaattccggaacttgcaccagtaataacagtgtatttcatataaaatccccctaaattcaaatttatttatggttagattgtatttgttagagtatactctaagtcaaatgttttttataaatttgatacgttcataaaatatataaggataagcatgtggagggagtttagtatgtatacaattagtgaggtagcaaaattattaggattgagcacacatacactacgttattatgaaaaggaaaatatattgattgcaaatcgtgatacaaatggaaatcgactttacgaagagtcacatataaagtggttgcagtttgtaatgaaattaaaacaaacgcaaatgccaatagcaaaaataagagaatacgctagattatatacagaaggggagcatacaacagaagctcgtttacagctcctagaagatcataggaaatctattcagattcaaagagaaaacttagaggttacagagaagatgcttgagaataaaattcgtacatacaaaagctcattggaaaataaatagatgttgttatgtgatgaaaaatggatttgatctatgagtatttcatcatagtgtgcggataaataaaaaagagcagctagcaaaagctaactgctccattcaagggatctctccaagggggagtggagaaaatattatgttactagcattattgacagattattaggaaatatacaaatcggatgaaagaaattttaaataaaatttcggtattgacagtttttaaaatgttcatgtacaatacatatgaatgacattcagtcattttttatggcaggatgcagttagcttagaaatggaacaaatacaatgataaatgaggatgatagttatttttatatagtattgatgaaagagtatatttttttaaaacaaaatgactgatagtcagtcataagaggtgagaggtatgaaaaatagagcttggttatatgtcatattaacatgtatctttgaaattttttgggtgtttggttttaatacggctaatacttggtggcattggattattattttaggagttatcgctgttgattttcacttcctttctaaagcgtgtgaacatcttgcaacaggaactgtatatgctattttcgctggagctggtacggtaggtactttcttaatggatgtatttcttttcggtggaagtttcagcgcaggcaaactattcttcattcttatggtagtagccggcgttatcggtttaaagttagctgacaataaagaagaaactgtggaaggagctgcttaaaaaatgggttggtttttcgtatgttgtgctgcaattagtgaaatagtcggtgtgataggacttaaaatgtatagtaaagataagacattagccaatggtgcgatttatataggtgggtttgctacatccttcgcatttttgtatacttccttcttatttttacaagtaagtgtcgcctatgcggtttggattggtatcggaacagcaggtgcagttttgttaaacatgttcttgtttggtgagtcgaaaagtaaagcgcgtatcattagtgtgtttcttattgtatgtggagtgacaggattaaaggcactttcttaaagatatattgtatttttatctcctaattgtttattaggagattttattataaaaaaatgatttcctcttagagttcactatcattgacagtacaatcgattatcttataaaatgagtgacagtcattcaatatgcgtgtgaaagggtttagatgatgaataaaaaagagaaaattgtctatgcagctattgaagtgtttcaggaaaagggcgtcgaaaaaacgaagatttctgatatcgtgaaattagctggcattgcgcaaggaactttctatttatattttccttctaagttatctgttatgcctgcaatagcagaagtgatggttgaaaagatgatacttgcagtgaaagaaaaagtgcaaaacgatgcgcctttctcaagtaaagtaacgcaagtaatagatgcggtgtttcactttatagctgaatatcgtgaaatacaggctttaatgtatgctggtcttgcatctacagaacatataaaagaatgggaagctgtgtatgagcccctttatatgtggctaagtgaatttttaaatgaggcaaaagaagctggtgaaattcgtgattcagttcacgcagagcgaacagcgaagttatttatcgctctagttgaatcagcagcggaacaagtgtatttatatgatcataaagatgatgagcaagtcgatttgcaaaaggcagaagtactagattttttaacacatgcactacatataaagaaatagtgagatgaacctgtctgaaaaggtaggttcatttttgaggaaaactgaatgatagtcattcatctaatgcgtatgtatgtgtggaaggatagtgtgaaattctaacgagtaggggggcatctctactcatgaatagcccacaaatagaaggataaagaaaaagcttcttgggcattattttttgagaggaacttacgggaagaggtgttaaaaagtgaagaaaccgataaaagaacaaaagatggtattggtcattcttttgagtaatatatttatcgcttttttagggattggattaatcattccggttatgccgtcctttatgaatgatatgcatttaacagggaagacgatgggatatctcgttgcagtgtttgcaatggcacagctcattacttcacctattacaggccggtgggttgatctttacggtagaaagaaaatgataatcattggattatttatttttggtgtttcagagcttctttttggattaggaaaagatgtatggatgctttatgtagcaagggtattaggcggaattagtgctgcgtttattatgcctggtgttacggcatatgttgcggatattacatctattcaggaacgtccaaaggcgatgggatacttatctgcggctattagtactggattcattatagggcctggaatcggcggatttattgcagaatacggtatacgtgtgccgtttttcgttgcagcagtaattgcttttatagcatgtgtgatttcgatctttattttaaaagaaccgttaacgaaagaagaacttgcagagatttcttctaatacgaaggaatcaagttttattggtgatttaaagaaatcattacatccaatgtatgcaattgcatttattatcgtatttgtactcgcattcggattatcagcgtatgaaacagtgtttagcttgttctctgatcataaatttggcttctcgccgaaagatatcgcagcaattattacaattagttcaatctttggggtagttgtgcaagtatttatgtttggcaaattggtagaaatgttcggtgagaaagtgttaattcaaatatgtttaattgtaggtgcagtattagcattcgtctcaactgtagtctttaattattggattgtacttctcgttacttgcttcattttcttagcatttgatttacttcgtccagctttaacgacatttttatcaaaagcagccggaaaagagcaaggattcgtcgctggtatgaactcgacttatacgagtttaggaaatatcgcaggaccagcgatgggcggaatattatttgatatgaatattcattatccatatgcattttcaggcgttgttttaatagttggtctcggcattacatttatgtggagagagaaacagttggctgaaagttttgcgaagtaataaaaccccttacgacggtaaggggtttttgttttattctgattaaagtttcattttataaacttaacccaaaccgttttaattcaataaaaatcccctctaattgctttcctttatccgttaatgtgtactctacacgaggcggaacttctggatatacttttctcgttataatgccttgagactctaattcttttagtcgaagcgataatgtttttggactaataccatccattgatttttgtaaatcactaaagcgtaatgttccttcgataagaagatcacgaatgattaaaaacgtccattttgtactaattacatcaagcgttttagcgataggacaaggtatgcccggtaaacctttcgttaattcaactggatttatatcgttcatggaactagcctccataaaatttttttggatgaatttgctttatagtatcacaaaactatacttttggtaactatatgaaaaaaatatcactacttccataaaggaagttagtgcatatacaatagcaatacgaaacaaaaaggatttatataaggaggtggtgatttccatggggataaaaaagttatttggatttcttagtttgtttgttatttgtattgtgcttgtagcatgtggtgtggaacaaaaaactgaagttcagttattaaaagaaatgccaaagccaaaagcaatgacaattgatccctcactaagtaaaaaagaagcgacagaaatggttcatgcggcgcagcgtttttatgcattttgggatacaggtaaggaggaacttattccgcagactgttactaaagatttcttcgataatacattgccgaaagggcgaacacaaggcattgaaggattaaagtttgcagcgcaaaattttcgtaaagttgtgcctgatatacattgtgagattgaagacttattagttgttggtgataaagtaacagcccgtctttcttttacaggaacgcataatggtaagaaaattaatttttttgcaattgatattttacatgtgaaagacggaaagataacagaagattggcatttagaagataatcttacactacagcagcaactcggcttaatagctgaagagtagatcatataggggagagaaaaacgatgaaaaatatatttattataaatggacatgaaaaatacggtacaaaggaaggacgattaaataaaacgttagtagattatatggttactgtattagacgagaatcatcatgtgaaaacaacaacgattcaagatggttacaatattaaagaagaacaagataagtttttatgggctgatgttgtgatttatcaaacaccaatttactggtttagtgttccaggcttatttaaaacgtatatggatgaagtatatgaatacggtttgttctttaaaggtgcagatgaatatggaacaggtggtttattaaaagagaaagagtatatgttctctacaacttggaatgcacctgaaaaagcatttggagataagacaaagttctttgaaggagaaagtttagaatcagcgcttagtcatttacatcgcgtgcaaaagtttctcggtatgagtccgttaaagagttttgcttgttatgatgtggtgaagaatccggatatagagaagtttttagtgaacttgaaagatcacttagatggagtaattaaataatagtatgtgaagaaggtactgttaaggatgtagtaccttctccttttataatgactcacattttaagacatggatggctgtatccataacttcgcaaaatttgcccaaccgaatgaatcaattgttacgttttttaaagaagaggggtatgtttttctttttagaacgtgatagttaaataaaatgatgtgttctgcttgtaaaaactcttcaatctcatacatgagttcatagcgcttttctttattttcttctagtaaaaatgtatctagtaaacagttaatttgtttttcgtagtgcgggtccatgaaccgatttacgaagcaacttttatttttaaatacatttaagaatgcaatttcatgattggcagcaaatacttctcccatgaaaataatatcagcatgtttatcaatagagcgattcatataatctgaaacgggaaatgggtgaagctctacttgtatacctaaactttcacatcgttcttttaagaaatatgcgtcatttgcactatctttaaatgcgaagaagtaaatatgtatcgtttctccattatatgtactctttttcaaatactcttttgccttttctaaagagtaggatcttcttgttgcaaggcggcttctatcagggaaaaagcttgatgcagcaattgtccgtctaccctctatgttacgaagtatcatttcaacatcatatagttctctccaagcttttcgaaagtaaatgtcgtgatgaggaccaggttttttaaagttgaagctagcataaatacaacctatttcttctatttgtatatcatgcctttcattttcctcttcgtttggtagttcataatcagcatctatttgcacatggtcaggaataccccaaaattcaatacggtctaataacgcgcgctctttaaaataatgggtgaacgcttcgagtatgatattatcttcagagtaatgagcaagtttgaaaggtccagtacctatataatgatgattttgaatactcgtatcacgcggtaaaattgcgagctgcattgaacttacatagtgtaagaaaaataaatttggtttcgctaaatggaatcgaatttgtagtggtgatggcgtttcaatttgaacgatttcttctgttaaccattcgaaaggagagtaaacttcttttagtctttcaaatgaaaattgtacatctttagaagttaaaactgtttcgttatgaaaatatacatcctttcgtaaataaaaagtccacgtaagcccgtcttcacttaattcccacgtatgcgcaatgtgaggctccattttttcagtaacatcgttatagacgactaatgtatcaaaaatttgactcgtaagatggctctctgtagttacagccacaaaagccggatctaatgggaatatctttctcgatataggaatctttaatacgtcgtacatatcatttgaaggttcgtatccaaaatgatgatgtagtttattttctatctttttttgaagtgcgagggggaggggttcttttaaaagaagaaagatatcttttaatttttcttgcgctaacagttcatctgtataggactcaatcgcttctacgaaattatgtataaatagaatttccgttttatttccgcggcctcgccctggagtccagctaattaattgctcctcgctcattttctttaataaaatctttacgtttttcgtactgcaatataaaacatccgctaattcttgtaagctatttcgcatatgttgttgatcttgtgcatgtagtcttagtctaatgtaatagtccataattttcatatatacacttccttctatcataaaaggggaaactctttagaatattctaacctttttcttcctttttttcaaagtaaaataagtaagcataaggaggggaaacaatgggattttggagtatgcatcgaaatataaaaattagaattataacatcgtttttaacacgtactgtgtccacgatgatttttccatttatggcgatttatttttccataaagttaggtagtgcgattgctggtgcgttactacttattaatgtcatagcttcattagtaattggtttatacggtggatatgttggagaccggcttgggcgtaaaaaggttatgattatcggtcaaagtatacaagtcatttccattgcttgtatgggagttgcgaattcggattacgttgactcaccgtggttaacatttatctttatgctagtgaatagtttagggtctggacttatgaatcctgcgacagaggcgatgttaattgatgtgagtacacctgaaaatcgaaaagtgatgtacagcattaattactgggctattaacttatccattgcaattggagcgatatttggtggattactatttgaaaactatagattacaattgtttatcgtattaactcttgttgcgattattactctatatgtaatggcagtatatatggaagaggtgtatgtggctagaaaaacagtagagaagaaaaatgtattaaaagatatggcggatagttataaagttgtaatgaaagatagagcttttttaattttttgtgcagcaagtatatgtacattgtctttagagtttcaaattaataattatttaggtgttcgcttgcagaaggaatttgaaacggtgcactttttattcgggaatggttttacgtttgatttaacagggattcgcatgttgagctggatttctgcagagaatacaattttagttgtgttatgttcagcacttcttattaaaatgctgaaaagcttcaacgatttgaaaatcttatatgtaggcttatttatttacacgattggatttgcaatactcggaacgagcaatagcttatggattttattaattgcagggcttttccaaacggtaggcgagatgatgtatgtgccagtgcgtcaatctattatggcagatatggtgccaaatgaggcgagaggttcatatatggcgattaacggaatggtctttcaagttgcaaaaatgaacggggcattaggtgttatgctaggttcatttattgcatcttggggcatgagtgctctgtactttatcgttggtatgagcagtattttactatttatgaaggcgatagggagagagaagtatgagggggaggtttctcagattggataaaacgatatgaaaagcgatgctagaaatcgcttttcatatggcttttaaaacggatcaacttcagctaaatcaggattgctatttgggtttgttaataagactttcagctcacctacttcagagagcgcaacgaggatataaccactaataaggacgacgagtccgatgacccttaatgtttgcagtgtaatatcacggctattgttttcggagttgtcttggggcgttgaaggtggattgttattcataaatagggctcccatcttttgtatttatatatgtgcgaaatcattatttaacttatggataggaattatatagtcattttcactatatgagaaatgcctatgaaaagtgataaggaatttttgggcgagaaaaggggggaatccaaaagattattaaaactgaacttttggattcccctctttttatttatcttgctatttgtggtggtcggatttcctgtaaacgaccagttgatgagggctaatgaatcagtgggggatgaataaaaccccactgattcattattttcatgtaaatacaaggttagttaaccaaattagttatcctaatatacgcaacgattcttcaataaacgctgggatgtcctctggctgtctacttgttactagctgattttgacatacgacaacctctttgtcatgaaagttcccgccggcatttttcaaatcgacttcaatagatttatatccagttacatcgcgtccttcaagtgtttgtgcagtaatgagtagctgaggtccgtgacaaatagcaaaaacaggtttttccgcatccataaatgctttactaaagcgaacaaaacgttcatcggcacgaagtatatctggagaaaatccacccggtatgaagagggcatcaaagttctctggagaaacatcatcaatacttttatcaatcacgacttcactttttccttgcttaccgtgtaccgttttccctttttccatttcaatagttgtgaattcatatcccttttgtttaaaagcttctactggctctgtgtattctgtatcctcgaaataatccgttattaaaatagcaatttttttactcattctaatccgctccttatattatattatcggctccagaatcttccttgggcaatgccttctataaatgattcaattgaagtatttgttaagttgtaaactcctgctccatccagtttaatcttactatggtccaaagcatgaggattactaaggacatgagctatcggtttaaaatgtttaaaagtagtttctgcaaattctaaaacagggggttgaatgacagactcactactaaacactaatactgcatcaaaaagggaggagtctgttgttgtataagtgtcagttactttaatggaatcattgaactgataaattttattatctatgatactatagttaatttggtgttgtacaaaagcttgaatccattcggacagaagtgagacgcttgggtcaccatttaatagaattgcaacatttttggaatcagatttaaaaatagtattggacatacttagtgcaggtgattttgcatctgaatttacttcgtgattttccttaggtaaaggagctccaataatgttagcgacttcttgtgctaattgacgatcgacgtggtttaagagagcaattacatttgccttcaccatgtctgatttacacttcccaacttcaaagcaaaaagcttcttttatgtgctgcttttcaatagggctcatactattgtagaaaagtttagcctgagaataaaagttaagaaagcttttactgcgacctctaattttatgcccatcaatcttttcttgataatgttcatatcctccttgttcggcttggacggttgcaggttgattgttatttaatccattaggatgatagcttgtttgaccgcgatgaatctgcatttgatgcataccatcacgttgattattatgaaaaggacatacaggctgattaatagggatttgatggaaattagggccccctaaacgagataattgtgtatctgtataggagaataatcttccttgcagaagagggtcatttgaaaaatcaatacctggtacgacatgaccagggtgaaaagctacctgctctgtttcagcaaagaagttatcaacatttttgttcagtgtcattttaccaactaattttacgggaacttcttcttctggccataatttcgttggatctaaaatatcaaaatcaaatttatgttcatcttcttctggaattagctgtaatccaagctcccattcaggataatcccctttttcaattgcttcgtataaatcttgacgatgaaaatcaggatttttcccggcaatcttttgagcttcatcccatactaatgaatgaaccccgagggtaggtttccagtgaaactttacgaaatgggcttttccttctgcgttaatgagtcgaaatgtgtgaactccaaaaccttccatcattcgtaaactacgcggaatagctcggtcgctcatttgccacatgaccatatgagtggactcaggattatgcgcaacaaagtcccaaaaggtatcatgagcgctagctccttgaggaatatcattatgtggttctggtttaactgcatggacaaaatcaggaaatttaatagcatcttggataaagaatactggcatattattacccactaaatcatagtttccttcatctgtataaaattttgtggcgaatccgcgtacatctcttactgtgtcgttggatcctttagaaccttgaacggttgagaaccgtacaaatacaggtgttttctttgaaggattagtaagaaaatctgctttcgtatatgtttctaaagattcataaagctgaaaataaccatgagcgccaaccccgcgtgcatgaacaatcctttcgggaattcgttcgtgatcaaaatgggtcattttctcacgaaagtgaaaatcctccattaaggttgggcctcttaagcccatctttaaagaaaattcatcttcagctatttttaccccttgatttgttgttaaagcatgtttgcattgattgtcagtaacgtgatgcttcaattgttccgtttttttattcacaatataggaccctcctttactctgttaattaatagataccctttttattaggtcgtaaacatgtattatcgtctttgtatgtaaaaatcataaaataccggttgtttaaatggttcttgtttgaggaggaaaaataaaaagccaaggagaaaatttattttctccttggcttttaagataattcttttcgttaaaatgcggaaattctttgcttcgtttttggtacaataataaatttgatccagagtaacccgacaatcataatgataaggctatgtaaaaattgacctgtagcaatgagtataacactcgaaaatacaatgagttgaatacttagcaatataaagattaagctaagaaattgcttcattctttctgcagtaccaatcggatataatgctacaataatatttcccgaaaaatatttccatagtgaacgaagctgcatagagatcatatataaaacgatgtaagcgatagcgccttttacgtatatatttggtatgaaatataaggcgaaagcaccgatcaatcctaagcgaatatatataccgaaataatcatttccacgtaaaaatgctagtgtatgtaagtagaagaaagttgctcgttttttatgtaataaaggttcaatccaatttgtaagccattttcttttatttacttgtttattcagttgcggaacatcggtgaaaatgctagcaaattgataaaaacgaacgttcattttttcttcttgctcgattatgtaatcccacggtattcgttttgtaggctgttttttcgtatatagaagtaggaaagcaagtagtaagagtagtccgcccaatatgagaacatttgcggaataaaacagcatgtaaatgattagggcgttacaagtaatacgaatgatcagccatatatttttttcgtgactatcacgccacatccaatgtatgtacatgttccaggctttcataatcattaacacgataaagattgtacataagaaaggtaccgttaattgcaatgattgcatagcaagtggaacgagaataaggaacgtaaataacaatgggaaaagctgaatgatgtaattgtatagaagagattttttgaaataagatgttaatttctcttctagtgctagtaaatagacagcatcaggtttttgaataaatgtacgtatagggcatctcgttataatgaatgtaagtacaatcgttataattattaaagatattcctttagaaggagatgcttttagaaactgagcataataatatgcaccaacgcatgaaataaagataaagctatatagtaaaccgttaatcatacgtgcaaagtatgtaatgatattttgaatatgttgttggaagcgactgctccatagcgattcgattgacatgtttttcacctctttgttctattatatatgttttacaaaagaaaaaacgagcaaattgcgttatgcaacttgcccgtttttcttttcgttattttttttctgatcacgattcattaatggatagaaagcaaatccaattacgaataaaccaattccgagaaggaacgtttttatatcggatgcgccagttttaataacccatagtgcgtagcaaagtgcgataactgcgactatgccatctgtaattcttgcccgcatttcatttttatatgtttcaccagttgcgactagttttaactggaagattggtgaaacgagatatggaatgaggtaggccagtgttgatacggtaataacgaatgtataagcttccgcaatggttcctgataatgttgagaataggaatacttgcgacataatgtttgttaatcgtaatgagtaaattggacttccttttttatttgttttcgtgaagaaggaagggaagaaaccttcttttgctgcttgataaggtacttctgagcttaataaaatccagcctaagatagaaccaaacagggaagtaagagcaagtaatgccatcaatttcccgccgccgtgacccattgcagcgtttagtgcatctgctaatggacgttcagaagcttgtaatttatcaacgtgaagtacacccattgttaaaattgtaattcctaagtaaatcgcaactgtaataagtaatcccgcaactgttgcacgttttaccgtttttggagaaacagcacggtttgataaaagaacggctgattcaattccgataaacgcccaaagcgttgtaagagcagctaaatttacttgtgaaagaagaccatgtgatgcacctgatttatcaatcatcggtgtgtaccattgtccaaacttagaagcttcgaatgcaaataacgtaacgacgatgaataaaaggaatccagttactttcgttgttgttgctaagaagtttagttttccagctccgcttacaccgtttgttaatataatatgagttccccaaagtaagatggaacaaatcgtaaatgtaattagttttccgacttctacgttaaacgagccgattgaaaatagtagtcgcgtatctttcataattgggaagaagagtgataaatatcccgcaaatgatgtaatgatggcaacgttacttgcccagtttgcaacccaatatccccataccatactgaagccagccatttttttcttttttggtgttgagaataaagcatatgcatgactttgtggccctgtcgttaaatcaggacgacgaattgctaaattaccgaaaacaagagctagcattaaaacaccaaaccctgtagttaaccaagctaaagtgacaccgagtgggcttgctgtttgtgccaacgtacttggtaccatgaaaataccagcgccaaccatgttaccgacaacgaaagctgttagtacccaaaagccccattttttttgttgcatagaaaaatacctccaaagttagtataaccaagtcaagcgaggagatatgtatgtcttcctgagtcaggaagagaagtcccaaacaaaacaaaaaaagcacgtaatctgccgctacatgctttctatcttataagaaacccacgacatacctctcgatagctctccacaaacgaaacgtttgtgacagttctgcacttattaaatgcagacccagcaagcgtgcatggtggacacgacttacttcggcaaccattcctttctcattccttcatcaatgccactacatctcctgaaatgatactcttaatgattgcaacctctacctcaccgagatacgaatgaggatttaaatattaaattaacgtctttaagagtaacaaatgaatttttatccgtcaatggatatagtaataatcagattatagagaagagtttgtgattaaaagtgagttaggagaggctgtaacgattattagttctgcagaagaaacagcgatagagttaagtactattttacagcacaaaggaattttgtctgacaatctgaatccgaagcatcgcttttttacaacgggatctgttttatcatttgaacatatcgctgagcgatggctagggtatcaaatttctgtagaatgtgtacatttgcctatgaaaaatgcgtgtatacataattaagatttagtaaattactttttttaataaatgaggttcgtttcataagaaggaaagaataagcttttaattgaagtgtttaaaggcatttcaattaaaggggagatttgattatggaattatcaaggtctcaattatttgctttagagtatatttcaaaatatgcagagaacgaaaaacgtggggctaaagcaacaattaatcatatacttaaaatgtcaaatattacagatgaaatatttgaagaagctgtcgctaatttaaaatctcatgcaaggattgctttacactttcatccagacagactagattcgaatatgaaaagtgttgctgaagcactgtttgagcaaggagtatataaaagtcagtttgaaacattgctatctaatggaagcgtatctgcttaccctggtggtgaacgtgacctttgggaaaagagaatatttggaggggcatatcaattagaaggcgtaacgaatgatcaacggccaaaatacggagcgctaaatttaatgttacatccagatgggccggctccgcgttttggttcatgttattttctcttatctccaaaagtttcttcgcgctctacatatacatatttagattcgcatcaagatccgaaagaaaaggggacttatgaggagtttgatatgattttagctgctcttttggaagagacattcgtaagagattttgcaattggtgaagggaatttgacgccaacaatattaattaatcatttactagctaacctgaaaaggccgtttatagatttagtaagcaaagagccagcccgtaatcttaatcattatattgaagcgcagattcatggagagatttctcttaaagaagacgtggaggcgcttgttgcagatccttcatttaagggtacggatgtagggaaagttttagaagaaatttgcctgaagtatgcgattgatttgtattggcacatcggttttgtacttatggtagacgaagttccaatggattttagaggttcaaaaatgccatctttagcaagacgcattgcacggaatcattgtatcgatgcaaatataattggctctgctgtagtagatttgaaatgcaatccattatcttggagtgatcgtggaacttatgaagaagtgcttcaggaattaaaattattatggcatgttttagttcgatttggaaaaccaaatcggaagtagaacgaaatacgctgttttttggaagtatttatatagaaaagaagctgatctatttatagatcagcttctttttataagattaaactaagtttaatacagttactttttcacgtgtcatagactcaaggctcttacgaataccttgtgcgcccatacctgaaccttttacaccgatgaatgggaagtggtcagggccgcgctctgtacgtccgttaatttgaacagaaccagtttcgattttattagcaattgcaaatgctttgttaatgtcttttgtgaagacacttgcttgtaagccgaactctgatttgttagcaatttcaattgcctgttcatctgaagaaacacggatgattggaaggattggaccgaatggctcttcccaagcaactttcatctcttctgttacgtgatcgattaatgttgggtaaattaagttacgctcacgtttgttaccgataacgatcgtagcacctttttcaacagcgtcgtcaactaaaccttgaacgaagtcagcagacttgtcatcgattaatggaacgattgtgctatcttgctctggagatccaactgatagttccgctacttgcgcttttaataagtcaacaagctcgtctgctacgttttcgtgtacaagtacacgtttaatagctgtacaacgttgaccagagtaagagaacgcaccgcttacgatatggtttgcagcatcttgtaagtcagcatcttcacgaacgataccagggtctttcccaccaagttctaatacaagtggaatcattgaagcttttttcgctaaatgtttacctgtgtttgtaccacctgtgaacgataccatattgatgccttcgtgttctactaagtagtcaccaattacagaaccgcgtcctgtcgctacgtttacaagaccttttggaaggccagctttatgtagtgcttcaaccattttgataccgctaattgcaccttgagttgctggtttgaaaataacagcgttacccataattaatgctggtgcaagttttgcagcagataagtttactgggtagttaaacggtgcgattgctaatacaacaccaagtggtgcgcgttggataatcgcaagtttagattttgtaccgcccgggaagctatcgcccatcatgctttctccgtgcatatgtaaagcttcttcgatcgtgtaacgaatgaagtcagctgtacgaacaacttctttcttcgcatctttatatcctttaccgacttctttcataatgatatcggcaatttcatcctgcatatttacgagctcatcagcccatttatataagtattttgcgcgatcttgtagggaagctttagcccatgatttttgagcttcttttgcagatgcaattgcttcatctacttctccgcgagtaattgcttgtacttgtccaattacttcgtgtaagtatggagatggaatttcgattgtttctcctgaagagctttctctccattctccatttaaataaaatttgtacgtattgctagttgtcatgattagtcctcctaaaatagcaacttgtaagagtgagtataaggtgattgtagggggtttgataacatttttcaaatgaaatgtttgtgaaaacgatttcttattctttttttattttgtatgccctttcttacagaacattcccttatttcaaaatggtgtatcatatatttttatttgaagtgtgaaaaaataattgacagaatactcaataaagttgtaagattataaatggaaaataaatgaagggggtgtgcgtaatgattgtaatcgtaaatgtaatgggcttagctctgttaaatggcagaaaacattcatatcattacgcaacccgtacggatatatagggcatctttgtcttataaaaagcgtacgttgcgtatatcgtaacgtacgctttttatgcattcctgtgcatatcgtcaagcggcggtatgcttttttttgtttattttcccttgtttggttccgataaaaaactttggaaggtggaaaaatgtgatgagattgtatgggttacgaaatgtaaatgtgatgggtctggatagtggataaagaaatgagaggtaaacgagaacgagaagggagaggttacattgttatcagtattactaaagttaaaatggttttttagggagcactggaagagatatagtattgccattggagctcttttaattgtgaatatagttgaagttattcccccgaaagtgttaggggttacgatagataatataaaaacaggaacgttatcgaacgaagcaattatgcaatctattcttattttaataggggttacaatcgttgggtatggtcttactttcgtatggcaacatcaattgtttggaggtgcatttgtacttgagaaaacgatgcgctctaaatttatggggcatttacttaagatgacgccgactttttatcaaaaaaatcgtactggcgacttaatggcgagggcaacgaatgatttaaaagcaatcgctatgacagctggttttggtatattaacgcttgtggattctagtttatacatgcttacaatcgtttttatgatgggatttacaattagttgggagcttacatttgcggcacttataccgcttccgattatggcgtatgcgatgaatatatatggaaagaaattgcatgaaagatttactgttgcgcaagatgcattcggtgatatgaacgataaagtacttgagtcaatcgctggtgtgcgcgttattcgtgcgtatgtacaagagaacgcagatcaagaaagatttcatcatttaggagatgacgtctacgaaaaaaatatgaaggtagctagaattgatgcactatttcagccaactgtgaaaatgcttgttggccttagttatttaattggtttagtgtacggcgcatatcttgtatttcaatcaaaggtgacacttggtgaactcgtttcatttaacgtgtatttagggatgatgatttggccgatgtttgcaattggcgaattaattaatgttatgcaaagaggaaacgcttcgttagaccgtgtaaatgaaacgttagcgtatgaaccagatgtaaaggatccgaaacatccaaagcttgtgcaagagccggattatattcagtttgatgatgttaccttttcatatccttcatcaactgaaacaaatttaaaaaaggtttcgtttacattaaaacaaggggaaacgcttggggttgtcgggaaaacaggaagcggaaagacgacgcttgtccgtcagcttcttcgtcaatatccgcttggagatggggatattgcagtctctgatgtgacgctggataaaatgacgaatgaaaatgtactcggctggattggttatgtaccgcaggagcatattttgttctcaaaaacagcgcgagaaaatattttattcggaaatagggaagcgactgaagaagaactagagaaagcgattgaaattgctgcgtttaaaaaggatttagagtttttaccagaagggttagaaacgctagttggagagaaaggtgtttctttatcaggagggcaaaaacaaaggatctcgattgcaagagctgttattcaaaatccagaaattttaattttggacgattctttatcagctgtagatgctcgtacggaagcagcgatcattgaaaatataagaacggaaagaagcggaaagacgacgattattacgacgcatcgtttatctgcagtgcaacatgcggattggattctcgttatggatgaaggcgcagttatagaagaaggtacgcatgctcagcttatccaaaagggaggctggtatgctgaacagtttgaaagacaacaaggtgaaagtgaaagtgcggatagtggggtgaaaatatgagcgtttcaaaacgattgtttcaatacgcgatgaaagtgaaagggacgatttttgctgcgatgttaatgttatttattttcgtcatcgcagagcttgctggtcctttcgtcgctaaaacgatgattgacgatcatatcgtcgggatagagaaaccttggtatgaaacagaacagagtgaagatgctgtttcgtataatggggctttttataagcgaagtgatcgctttgaacaaggcgagaaaaaagggaaagaagtacgcgtgatgcaagtcggttttcaatattattttgtaccgaataaagtaaatgcggaaggatcacgtactgtaaaaggggatatgattaccgttcaaaatggtaaggcggtgcaagtgtataaagcgaaagcattgacgaaagaagaagtgtttgcgttttataaaccagaaataaaccgtttactcctacttggtggtggctattttgctttattagtagtcgtatcattatttgcatacggaaagcagttcttcttgcaaaaggcagcgaacaaaattattcaaattatgagggaagatgttttttctcatattcaaacgttgccaattcgttatttcgatcatttaccagcagggaaaattgtgtcgcgtgtgacgaatgatacggaagccattcgtgatctatacgtaacggtacttgcgacattcgtttcaagtatcatctatattattgggatattcgctgcgctatttttacttgatgtaaaattggcgacgttatgtttactcattatcccgattttaatcgtttgggcaattctttatagaaaatacgcgtctgtatacaatcataaaatgcgctctcgtttatctgatattaacggaacagtaaatgaatccattcaagggatgccaattattcaagcgttccgtcaagagcgtgaaacgaaaaaagagtttgaagaattaaatggcgattattttaagtatcaaaataaaattttgaatttaaatgcagcaacttctcataatttagtatccgtattaagaaatatcgctttcacaggtgtgatttggtatttcggtggcgcttcattaagtgctacaggcgtcatttctctagggatactgtatgcgttcgttgattatttaacacgattgttctcaccgattacgaatatggtgaaccagcttgctaacttagaacaatcgcgtgttgcatcagagcgtgtttttgaattgttagaggaaaaaggagaagcagtagaagaagagcgtatgcctcgcttacaaggaaatgtgaagtttgataatgtatcgttttcttataatgggaaagatgaagtgttaaaaaatatttcttttgaagcgaaacaaggggagaccgtggcacttgtcggtcatactggatcaggaaaaagttctattatgaacgtactctttcagttttacgagtttgaaaaaggaaagcttacgattgatggtcatgatgtaaaagagatgccgaaacaagcaactcgtgaacatatgggaattgtactgcaagatccgtttttatttagcggaacagtagcatctaatgtaagtttagaaaatgaaaaaatttcaaaagagcgcatcgtaaaagcattgcgtgatgttggtgctgaaagatttgcgaacaatataaatgaagaaattacggagaaaggaagtactctttcaaccggagaacgtcagcttatatcgtttgctagggcgctcgcttttgacccagccattttaattttagatgaagcgacatctagtatcgatacagaaacagaggcgatgattcaacaagcgctagaagttgtgaaaaaaggaagaacgacatttattatcgctcaccgactttcaacaattaaaagcgcagatcaaattattgtgcttgatagaggaaccattttagaaaaagggtctcatgatgagctaatgaaaaagcgcgggcgttattatgatatgtacaaaacgcaaatggaagggaaccagagcgcttaataggtatgggagagaacttgtgattttcacaagttctttttttagtgaatcagggcagttaaataagaagtattattttacctttcgtacaataaatgctatattaaaaaatgttacttattttttgtatgtagcattatttttcccttttgtttgattatgaagaaaaaggataaactaaataagaacattttcattgaaaaattgttcaagattgcatacaatcaatatagtttttaaattcctatcagaatacttggaggattactatcatgaagaaattattttcagtgcttgcagtaactacattagcgatcgggattgtagccggctgcggtaaagaagagaaaaaagatacagctagtcaagacgcgttacaaaagataaaacaaagcggtgaacttgtaattggaacagaaggtacatacgcaccgttcacattccatgattcaagcaataaattaactggatttgacgttgaactatcagaagaagttgcaaaacgtttaggtgtaaaacctgtatttaaagaaacacaatgggatagcttacttgctggtttagatgcaaaacgtttcgatatggttgcaaacgaagttggtattcgtgaagaccgtcaaaagaaatatgatttctctaaaccgtacgtttcatcttcagcggcattagttattgcaaaagataaagataagcctgctacatttgctgatgtaaaaggtttaaaaggagcacaatctttaacgagtaactatgcagatattgctaagaaaaacggtgcggaaattattggtgtagaaggatttagccaagcggcagaattattagcttcaggacgcgttgattttacaattaatgataagttatcagtattaaattatttagaaacgaaaaaagatgcaaaaattaaaattgtagatactgaaaaagaagcttcagaaagtggattcttattccgtaaaggtagcactaagcttgtacaagaagtagataaagcgttagaagatatgaaaaaagacggtacgtatgacaaaataacgaaaaaatggttcggtgaaaatgtatctaagtagtgcattagtttcagatcgattgtctacttggatagatattatgcagacttccttcatgcctatgctgaaggaagctgtttttacaacaattccattaacgcttattacatttattatcgggattatacttgcaacgttaacagcgctcgcacgtatttctggtagtcgtattttacaatggattgctcgtatctatgtatctatcattcgcggaacgccacttcttgtacagctatttattattttctatggtcttccaactcttaatattgaagttgagccatatacagcagcagttgttggattttcattaaatgtcggtgcatatgcatctgaaattattcgtgcttctatcctttccattccgaaagggcagtgggaagctgcttatacaattgggatgacatacccacaagcgttaaaacgtgttattttaccgcaagcaacgcgcgtatcaatcccgccgctttcgaatacatttattagcttagtgaaagatacttcattagcatcgttaattttagtaacagaaatgttccgaaaagcgcaggaaattgcggcaatgaactacgaatttttaattgtttatttcgaagcaggtcttatttattgggttatttgtttcttattatcaatcgtacaacagatgttagaaaagcgttcagaacgctatacattaaaataatccttttacaaaaggagtttttgtttttatgatttcaattcagcatttacaaaaaagtttcggagataataccgtactaaagcatatagatttatcagttgagaagggggaagtggttgttattatcggtccatctggatctggtaaaacgacattcttacgttgtctcaatgtattagaaacaccaaacgctggtaatattcgaatcggtaataaagaactcgacttctctcaaaaagtaacgaagaaagatattgtcaatcttcgtacgcaaacaggtatggtattccagcaccataatttattcccgcatttaacagcacttcaaaatgtaatggaagggctcgttacagtgaaaaagatggggaaagaagaagcgaagaaaaaagcaaactatttccttgaaaaggttggtcttgcggataaagtagacttatatccgttccaattatcaggcggacaacaacagcgcgttggaattgcgcgcgcgcttgcgatggagccggaagtgttactatttgatgagccgacgtcagcgcttgatcctgaactcgttcaagaagttctgaaagtaatgaaagaacttgctaaagaaggcatgacgatggttattgtaacgcacgaaatgcgttttgcacatcaaattgcaaaccgcgttattttcatggatggcggtgtcgttgtcgaacaaggtacaccagaagaagtatttacaaatccaaaagaagaacgtacgaagaagtttttacaaatgttgcaataaattaaggaaggtctcaaggcatatgccttgagacctttttgccatatatatttatttgtggaatccgccaaggctttgctcagccattgcaactagacgttttgtgatttctccaccaactgaaccgttagcgcgagccgtagaatctgctcctaattgtacaccaaattcttgagcgatttcgtacttcatttgatcgattgcagctgttgcacctggtactactaattgatttgaagaattttggtttgccataggaatatatcctccttagagttataaaagtttttttggttggactagctggagttgaaccagattatcgccccgattggcgctaatccatcggtaattaagtttgtactcatagtatggatgttacctagaaagatatacaaaataataatttgtaaattttgtcaaaaaaacttattgatttcgtaaattatgaaataagagtaatcgttgtatttttaagaaaacaggccaaactaaggaggatattaaatataattttctcattgtagcctgctacttgtaggctaattattagcttcttatttatgatttattgaaataaaaatgaaatcggtagcaactttatagttctatttttaagtagggatggagtgggcgctcctatgtttggataggttgctctcttcactctaaaaaagagaggctttaaacgataacgtatggaggaatcatgatggggatttgcccgctttgcaatgcattagaatcacaaacatattcttgtcaaaattgccaaagtatactccaagattatgggaagtctgtagattatatagacgattatagtgcctatatggatcaagaattattaagtgcagtagatggtttaacgcataataattcaaatgaatattgcaatcatattttttattgcggagtatgtaacgtggaaactgaggttgtagtaaaacttgtgtaaatagaaaacttccaccttattatctaggtggaagtttttgtttttgtatttgtgagtgaatcataggagaagggatatgttcggtgtttgatgaagtcccggattttatctgggacattttttcctttgcatcacgtaaggaatgttcagttaagtagatggcatattcgtaaaataattggcgtgtcagttcactttgttcttttaatttggcatcttggaatacagttcgcccaggtttagagttggcttcaaataaccacggattttcctttgtgtctaaaccgatatcgaaaccaatctcaccgatgtttccagttacttgctcgtcgagtgcataacttatttgcagagctgtttgttttaatttattttcaatttgaacttgcttcgttgaatctggaaaaagctcttgtagcaactttgtatcaccgccgctatttacatgagttgttaaactgcctttgccggcgattttggcgacgattgcactaactatccaattaccgaaatgatttttatttgtatgaatgcggaaatcaacaggttgaccatcaaagcgaagtaacgaaataccttgctgtacgataaacttttttaaatcatgtccttttaatacgtggtttagaagagtttctaatgattgatactttcttagtttattttcttcattttcgcgataacgacagtagtagcaattttctgtttgagaataaaatatttgatgaatatttctaccaaagctcccgtgtattggtttcatgtacactgatttatatgtgccaagaaaccgttctacttgttcgaaatgctgaaatgcttctgtatttggtaataagggtttaattgattcgtctttcataagaagttgatgaacttcccatttattgaaaaaccctgggttaaaccatggaatggagtagtcttgttctaactttctttttgctctgacaattggtttgtaattttccgcttgtcgattcggtagtcgatcgtaaatgacgtttggtaaaggaacctttttctttatccattgtttctctcgaaagaaatatccgttaattgtttcttcttcccagtttatatgttgaacgccaaagacgaatacgaacggtcgtaatgagaatggtggtgttaacaactcactgagagcaattgaacgatttcctaaaggggtagaagaatcatcgttaaagccagttgtaaaaatgccgattaatggtccgaaaataattgtttggttttgtgtgaatgcatgaatagtagttgattgaggcagtaaaagtttttcggcaatatgctttccgataataatttcgcgagtaaaggaataatgaatttttacttcttcacttgctatatgacgtatgccgaaggagagggatgtaataggtggtgtaatagaaaaaacgtaaggtaaagtaatgctatttggatgttcatctgaaatatttaatgtatatatatgttctttcaaaataggtttacctcctttcattatggtgtaaagcgactgaatttaagtggtccgtgaaatatcttttcagctaatgaatcactatgacgaatgtattgttcgtaaggagggatcgtgttgacatacataagccagattgcacctttttgatccataattgtggaaagttctagttcaaataacgaagaataagactgatctagtgtttggaatacttcatttataatgtcgtgtaaagcgtcgtgcaatagttgcacacctgtactagatagtacgtatttaatttttgaaaatgaatgcaatgaatcatcgtccgttgctgagggtaaaagctgattaggaaatgagcttttttgtataaattgaccgataacattccaagtttgttctttgtttttttgcaaaatggttcgaatgtgcagtggatatgttaattgatttggtggttgtagcatagtgtgcgctatgtaacgtgatgaacgtatgttagatttacaccaagatataaattcgtctgtgcgtttgattgaaatagaagtatggtatttttcatttactgtatcgatctgaaacgttttatttttgtaagcgactcgatataagttatctttagaatgtatattagtggggcgtataataatatctttagtttttaacaacagtttgaaaatgttttgtatcgtcgcaatttcaaattttggtatataaggagacagttttttattagtgagaaataaatcatgtagttcacttgaattaataagtgtgttatttaaaaaggtagtggaaggacgattgtgcaaagagtgaataattgattttactttttcaaagtctgtttcctcttgaaaagaataacgatcatatatataagaaggaatagggaatgtttgctttttccattttcctgtatctgtatcgtaaataagaccagaaacaaggtctgttttaggatcaatacaaaatggcgtaaactgggcaacgacattatgataaagccgagcgcgtttagcgatttcggtgtaatacgtttgctcataatgaagtttagaagttaaaaggccgagaaccaacgaaatcactcctttactactatttgcataataggcgaagctatatattgcaaatacgtttttataccattatacttttgtccgtatgatgatatgctatagttttggagaagtgaaaggttgattgtaatgaatatatggttaaatatgttaacgacgacaggactcggagcaattattggaggatatacgaatcatttagcgataaaaatgttatttcgtcctcatcgtcctatttatatcggaaagtttcaagttccatttacaccagggttaattccgaagcggcgtgatgaacttgctgttcaattaggaaaaatggttgtagaacatttgttaacaccagaaggaatcggaaaaaagctaacaaatgaagagtttcaaaaaggtttaattcactgggcgcaagtggaagtggataaagtaattacgaatgaacaatcactgcgatatatgttagaaaaatggaatgtagcacatgtagaagaagaagcgactcgaaaaatcgaacatgtgattacagaaaaaattcatgcatttttagcagagtattatacatatacatgggaacaggctttacctcattctgtacatgaaaagatagagaatgcgattccgaatgcctcggcgtttattttagagcgaggaattagcttttttgaaagtgaagaagggaaagcgcgtctttcaaaaatgattgatgatttctttgcttctcgtggaacgctacttaacttagttgggatgtttttaggaaatgtaagtgttgtggatcgtgtgcagccagaagttattaagtttttagggcaagatgctacaaagcagcttttaactgacgtactgcaaaaagagtgggaaaagttaaaaggaagagatgtaaaagaattagaagcatttgtagagaaagaaatgattgtaagctccgtgctgtcagcagttaaagtagaggaaacagtgagtaagtttttaaatcaatctgttcagcaagtatgtgaaccagttcgagaaacaattattgaaaaagtggttccaagtgcagtaacgaaaggcttaaagtggggaacagaaaacgtagagagtatactaaacaatctacaccttgcggaaattgtccagcaagaagtgtctacattctcaacagaaagattagaagacttagttctgtctattacgaaaaacgaattgaaaatgattacgtatttaggagcgttattaggcggaatgatcgggctcgtacaaggattgttactattgtttcttagataataaggtgagtacatagaaataaaagtgaaatttcttcacatctcttgcatagtttgatatggtaagaagaggtgcgtatgtaaatgcactgaaaaggcagtgcgtatgaaaagcgctagccttctaaaggaggaaaaataaaatgacaaagaacattcatgatgttgcatatgaattacaaaaagcaatcgctgaaaacgaggacttcaaaactttaaaagagagctacgcagcagttcaagctgacacagcttcaaagaacttattcgatgagttccgtacaatgcaacttagcctacaacaaaaaatgatgcaaggccaagaaatcactgaagaagacaaccaacaagcacaagaagttgtagctcgcattcaacaagatgctaaaattacaaaattaatggaaactgagcaacgcctaaacgttgtaatcggtgacgttaacaaaattatcatgaagccacttgaagaattatatagcgcgcaacaacaagcgtaatagtggaagacgctcctagtttaggagcgtcttttttgtttagggaatttaatagttatatcacaaaaactccctttcaaaatagccatttcttattgattattttgaaagggatatgtaacacatcggttaattttttttattgctgttaattgaagttttaatatttttttcgttcaaaaacttttcaatctctttttgtttcctcccatttattttctcaaggcgtttcgtaaaagaaaaattggccttgaataagttaccatcttgggcgagtttgtctaattcttgatctagctctacgaaaatatccgtagatgatgacataaattcatagatttcttttgaaggttttttataatcagtaggtaaattattattactaataaactcatggaaattcatatcgttttgtttcgctaaatcaattagtttttgtaatttttctcggtcagattccgtgaaattcttatcaaaatttgttgaagcgagagggataatattttcagataacttccaactataatctatataattttttatattttgtttcatttcgtcttcattaatagtttcatttttctttgaggaactaaatatattttctggaactttaatagcaacatctttaatagattgtacatcgttttcttccttaggttgtgcactgtttgaacaagctgatagaaataaaattgtaagtaacatgagtggatataaaatataatttttcatcttaatctccttttgcattagtgtcgttgcaaaatagctacattccatttcaaatatttaactaaagctacgtatagatgttttattatttgataacatatgacggatattagtaagccgatgcaaaaggctatgaatacattgtaaacatcggaataactgatttgatgaaaccctttaaagaatcctaatcctattaataagataggtgaaataattaataacggagtggcaattataagtgttagaagaagcggtaatagaaagagtaatacgaaaaaggcgataatgataaatataaagtttaaaagacttaagctcataacagaaaacagtgctgtcataatgttttttaggctgcgtttcttgtcagctttactgattacatatgaaatattaagttctttagcgatagttttagggtttcctagctttttagaaatttcctcttcagatattccatcttgtttaccactaataaaatgagtttcgtactccgagataatatcctccttttctaaattaggcatattctgcagagaggaactaagttgttccaaaaattcatttttgttcataacaatcactttcctttatagaatgatgaattacagttgagaatcttatcttctttctaaacagcacaatctatatctaccttttgaagggtatatataaattataaaaaaagattccaaataatggttattccattatttacaaatatatcatttgctattgttctttgcaaggtactataaatttgttaataatgtgaataagtggaagtatttttgtacatttttagaagagatataaaaatgttattttaagataaacaaaaggttgtaagcgcattctttaaatcttgtcaaaataatatcgaattcatattgttggaaaaataatgcatttgtaatataatgataaatgatacttcaccacattaattaactaggtgaaattaaaaatctttattacacaaattatgaaacaaaggaatgattagtttgagtacaggtgtaaaagtaaacgacgtgaagacaaaaacaaaaggagcagatcttgttgttgattgtttaattaaacaaggtgttacacatgttttcggtattccaggagcaaagattgactctgtatttgatgtattgcaagaaagaggaccagagttaatcgtttgtcgtcatgaacaaaatgcagcatttatggcagctgctattggtagattaacagggaaaccgggcgtatgtcttgtaacttcaggaccagggacatcaaatttagcgacaggtcttgttactgcgaatgcggagagtgatcccgttgttgctttagctggtgcagtaccgcgtacggatcgattaaaacgtacgcatcaatctatggataatgctgcactattcgaaccaatcacaaaatatagcgtagaagtagagcatcctgataatgtgccagaagcacttagtaatgcatttcgaagtgcgacttccacaaatccgggagctactttagtaagtcttccgcaagacgttatgactgcggaaacaactgtagagtctatcggtgcgctttctaagccacagcttggaatcgctcccacaaatgatattacatatgtagtagaaaaaataaaatcagcgaaattaccagttattttactcggtatgagagcgagcacaaatgaagtgacgaaagctgttcgtaaattaattgcggatacagaacttcctgtcgttgaaacatatcaagcagctggtgcgatttcacgtgagttagaagatcatttcttcggccgcgttggattattccgtaaccaaccaggtgatattttactagaagaagcagaccttgttatttctatcggttatgatccaatcgagtatgatccaaagttctggaataaacttggcgacagaacgattattcatcttgacgaccatcaagcagatatcgatcatgattaccaaccagagcgtgaattaattggtgatattgccttaacggtaaatagcatcgcagaaaagttaccgaaacttgtgttaagtacgaaatcagaagcggtattagaacgattacgcgcaaaattatcagaacaagcagaagttccaaatcgtcctgcagaaggtgttacgcatccacttcaagtgattcgtacgcttcgttctttaattagtgacgatacaaccgttacatgtgacatcggttcccattctatttggatggcgagatgtttccgttcttatgaaccacgtagattattatttagtaacggtatgcaaacgttaggtgttgcacttccttgggcaatcgcagctactttagtagaaccaggtaaaaaagtagtttccgtatcaggtgacggtggtttcttattctcagcgatggagttagaaacggcggtacgtttaaattctccaatcgtccatcttgtttggagagacggcacatatgatatggttgcattccaacaaatgatgaaatacggcagaacatccgctacagagtttggcgatgttgatcttgtgaaatatgcggaaagtttcggggcgttaggtcttcgtgttaacacgcctgatgaattagaaggcgtattaaaagaaggattagcagcagacggccctgtcattattgatattccaattgactatcgtgacaacattaaattaagcgaaaaattattaccaaaccaattaaactaatggaggcagatttgagatgactgttgcgcaattaattgatattgatgcaaaaaaaacgaaaatgagtaatgaagtatatcaaacatctacaatgcttgcgctattagatggtatatatgatggtgtgattagctttgaagatttgaaaaaacatggtgattttggcatcggcacatttgatcaattagacggtgaaatgattgcatttgataatgaattttatcatttacgttcagacggttcagcggaaaaagtagagccagaagaaacaacgccatttgcaactgtaacgttttttgaaaaagaaatgagttatacggtagagcgtccgatgaatcgtgaagaagttgaagcgttattacatgaattgatgccaagtaaaaacttattttacgctattcgaatggacggtacgttccgtgaagtaaggacgagaactgttccaagacaagaaaaaccgtatacaccgctcgttgaagtgacgaaatcacagccaatcttttcatttgaaaatacagaaggtacgcttgctggattttggacaccagattacgcacaaggtattggggtagctggattccacttacattacattgatgatgaaagaagcgggggcggacatgttttcgactatgttgtagaaaactgtacgatccaaatttgtcaaaaagctcatatgcatttagcacttccagaaacagcagattttatggcggctgaattatcaagagaaaacttagaggataatattgcaactgcggaaggtgcagagtaaaagggaagccgattcggcttctcttttattttgagttactcccgatatgcggaacaatgctcatcagaaatagaatagttctctttaccagttaaggctgatacttctactaattgatgtccaagcccatcccatcccatactgtaacagtatataaggatgaccatttaatattcccacgagcgagtcggaaagaataatagtcgttatctgttgttactaaaactttgttataaataatatttttcgtttttttattttgtaaaataaggacaaagtctagtttatcttcttctttcggaatttgtagtattcttgctacaaacattccatttgggtttttcttccttttatgtactttttctgattctatttttagttcaggtttgcctctcataatctctccctttaacatatgcttacttctttgaaacaaacggatgtccctcataataaaaacgccacggataatgtacagcttcttctgcatagtcgatattaatacgaggtcctgctgttattttatattgtgatgatatgtgttcttcttttggaactaattcaatatgtaacgtatcactttgtaacgatacaccgcgttcttctaaagtaattccgagggcacggcatagtttgccaggaccgttcgttaaatttttgtactgcgcttttgtaatttcggtcttattgtagcgcgctagttttatttcttctattccatctaccggctcaagggctcgaatgagaacaccttgcggggtgcccgctggtgctgtaataacgttaaagcaatgatacataccgtaaattaaatatacgtaagcatgccctggtgcaccaaacataacttctgtgcggtccgttcgtctgcctccgtaactatgtgcggccttatcatcggggcctttatatgcttctacttctacaatgattccgcttcgctttattccgtctacaatatgaacaagtttttgtccgagtaatttttttgcgacttctaacgtatcgccttcataaaaagaaggaggtgcctgcattgtactatctcctttactaagtgtatatgtatatagtaaaccaaattttcagtagtaattctaactcgttctatttatcgggtttatttcataaattatggatagagtacaacagcgaagagggggagtgcgacatgatttatcgcttactagctcttaatatagatgggacactactatacaacaatggaaaaattgcaaaaggattaagagaaacaattgaatttgtaaaaagaaaagatgtatatgttacgttatttacgagtcgtaattttcaatccgctcataaagtagcaaaggcgttaaaattagattctatattagtgacacatggtggtgctttcgtttcagcaacgttagataagccgtacgttcaaagaagattatctgaagagaagacttttaacattgtgcaagtgttagagcactttgattgtaacgtacgtatttctcatgaacggttttcaatcggaaatcgtgagagaaatacaccaaacttaattgcgcgcactgtattatcaagtgcagacccgttattttatccagttcaatttgtagattcgttaggtgatgcgcttcgtgaccatccggtagcggcgccaaaaattgatgttcttttccaaactaaaggtgaaaaagaacgcgggctaaatacattaagaaaagcattccaagatgtagagtatgttgaatgtgattcaaaacgaatagaaattttaccgcaaaatgtatcaaagttacgtggattacaattgcttggagagcatttaaatatttcgctaaatgaaatggttgcgattggagatagtatggaagatttagaggttattgaaaacgtgggacttggggtagcgatggggaacgcgcctgtagaattaaagcaagcagcagattggatcacacgttcaaatagtgaaaacggtgtagagtatatgattaaagagcatttccgtaagcaattcccgcttccgtttttgaagaatcataaaaatacaccgaaacgatgacagaaaaacgtagctttttggctacgtttttttgtttatcttattaaaaacagtgaaagcgttttaaaatatgaattgtgtatgaaatctatacaattcacttgaatcctttagaaaactaatgtaaagtggatgatgttgccaaaacagttacaccacatgaaatattcttcagattaattttattgggctcccatacgtaaaagtatttccgcatgacagtttagttcacgtattatttcaaaaatgaattgtagcaatcttattaagtagttgtagtgtttctttgttttatttaaatggattattttaagttaatgtgagtaaggtttggtacatatgatatgtacttctttttgtggttttaggaagtttaaaagggggaatgaatttcttgaggaaatcatttaatcaaaaaattaaaaagttaagtagtagtttaatagttgtattactaatatgtatgaattttttaatccatttaccatttaaagcagaggcagctacaacagaattaaaaggtttaggtgatgtatcttattacaacgccatcatttttggagatcatagtgcaacgagtgcggatattgaaggtgcgatggctgttcagaaaaatatgaacgcatcaagttatacagtcgtagcggctgcaactggagcaaataacttagctggagcaacttgggtagatgaaggatatccatcattattactaggcggtcaatttacgaaagcgggagcaggacaagtaattattcaagatggaacagtggcgatgacaaaagacggtgacccagatggcgcaatgaaaacatcatatgaccgtatctcttataaagagcaagcggagattgatgctaagtttaaagaatttagaaaagacgttgatagcgtaattgaggatgcgggccaattacatactgataaaccaaaatcgggtatgacctttggaatcggtgaagatgtaaagaatcctaatatttatgtctcttcaggattagaagggcaagaaccattcaatgtaaaggatgtttatcttccaaatgtaagtaacaaagattttattgttattcattcagatgcagaagaagttaattttggtggcggtgcaatcctgtatgatacgacagataagggcgggttcacattagctaatacctctcaagcatatgaccctaattccttcttcactgagttagctagtaaagtcatttgggtgttccctaatgctaaaaagataacaactaaaggatatggtgtagtaggtagtgtgtttgcacctaatgcagttgtagaaacaaaaggtggttctattaatggacaagcctatgttggaggattacaccaaagagatggttttgaggttcataactttaaatttaactggccaaagtggaataagccagcagctgaaaaaggacatttacaaattaaaaaagttgatgaaaacgatgaaaatattgttttaaaagacgcaaaatttgatgttatagacaaagataataacgttgtggctactgttacaacaaacgaaaaggggattgcggaagttaaagatttaccatttggtgactattttgtaaaagaaataaatgcaccagaaggatatataaaagttgatacaccagtcaaagtaacaattgataatacaaacgtaattgaacttgttatgaagaatacgagaaaagtagagaatggccaatttaaattattgaaaaaagatagtgaatctggtcaacttctaccaggtgcaaaatttgatgttatcgataaagatgggaaagttgtggaaacaattgttacagatgataaaggtgaagccttatcgaaacaacttccagttggaagctatacattaaaagaagtagaagcaccgaaaggatatgaattatcatctagttcagtttctgttgatgtagaggctaataaagtagtgactgtagatgtggtgaataaaaagatccccgaaaaagtaacaggtcaatttgaaatcgtgaaagtagatgcggaagataaaacgaaagtattatcagatgcagaattcgaagtgtataaagatggtaaaaaagtagatacgttacgaacagataaaactggtaaagtagtttcacagaaattagaaccaggaaagtatacattaaaagaaacgaaagcaccacaaggatataagttgttaaaagaagaaattgaagtcgttgtggaagcaaacaaagtagtagaagtacaagtagaaaacgcaaaagaactaggaagcttacaagtaatcaaaaaggatgcagagagtggaaaagttctagcaggtgcagaatttaaattaaagaacgaagctggtcaagtagttggagaagcgaaaacaacgaataaagacggtgttgtgaaattcgaaagcttagtgccaggaaagtatacgttagaagaaacgaaagcaccagaaggttataaagcgttagaagtaacagtagaagtaaatgttgtagcaaatgaagtagtaaaacaagaagttatgaatgaaaaagtgaaagaagaaattacaggtcaattagaaattacaaaggtagacgctaataatacaaataaaatattagcaggcgcagtgtttgaaatttggaaagacggaacaaaaatcgacacattaacaacaaacaagagcggtaaagcgacttctaagaagttagaaccaggagattacactttaaaagaaatccaagcgccagaaggatatactttatccgataaggaaatgaaatttacgatttctaatgaaaaaattgaagttgtaaagcttcaaattacaaatgaaaaagatacagaaaaaggtccggaaaaaccaggtgaaggaacagagaagccgggtgaaggaacagagaagccgggtgaaggaacagaaaagccaggtgaaggaacagaaaaaccaggtgaaggaacagaaaagccggatgaaggaacagagaagccaggtgaaggaacagagaagccaggtgaaggaacagaaaagccgggtgaaggaacagaaaaaccaggtgagggagtagaaaaacctaatttaccagaaaaaggacaaggttcttctaataatcaacaacttccagctacaggacacaatacgaattacgttccattcatcggttttatgcttctgctattaggaatacgtttaagattcatggctaaaaatagctaaaagatgtataaaaggcatcagagatatataatctctgatgccttttaagtgaatacagataaaatgaaaatatctatatggaatgataaatatgttaagcttcaattacgctaagcattctgtttataaatgcagctgcgtgtgcacgttgtgatggtccttttggtacgaattgattaaattcattaccttttacaattccgtatccatacactctttgtacttcttctttagcgtaaattaagttttggtctacgaatggtagttcaacttgttttgcaaaaataccagcgtgttttagagaacgatcgatcataataacagcttcttcgcgtgtaattgtagtatttggatcaaatgtattatcaccacgtccgcggattatacctgcgcttgctgcacgattaataccgtctcttaacgatgggtgtacttgttctaagtctgtgaaattagcatttccacttggtaattgtaaagcacgagtaattagtgtagcaaattcagcacgcgttacaagacgttctgggaagtacttgccgttcccttctccttgcataatgcctctagctgctaattgacgaatgtcttgttcataccatccacctgtaatgtcatcagttacgggatttttttgattttccttatagtatgtttcagttccttttaagaaagcatcccattgtccgcgttgaatcataaacgcagggcagttttttcctgaccaaaattggtgtttttggaccttatctagagaaatatttaagtcgttcattaaataagctgccaatttacgggcattttctaccgctttttcatagtttccatcttgattaacggcaatttcaattccgatagattcatagtttccagttttatttccagcatgccatccaacttcatttactggaagatgttggtaaatctctttatcatctactgtgaaatgccaagatgcggcgcgatcagctgttccgcgtgcttgattatctaagaattttgcatgatttagagcattggcacccttcgctgtattagctgtttcgtgaatcgtaatatatttaggtaccatcgggtagccagggcgaatatcgtcatttccttttgggacaatcatttctttaaatgtaacgccataaatattgtttgtttgtagagcttctggcgatctcaataaactatttttagcagtacgactgttttttaataatgaagcttttgtaccttcaaatgtagcagaaggtgcataaatccattttgctgtttcatttatttggactttaaaccaatttccagcttgttcagtaggagttatgacttgtggctgtagtttcccttcttctttaaatgattggaacggaagggcatgtatggaagcttcttcttttacgattaatttttgattagatagtttatgaatctcttgaacttctaagctattatcattgttatctatccatccagcgccagttggcgtcgttatgtaataagcatttccttttttctttgtcgccgttacgacttgttctgtaatctcgatattcgatttgttttttaaatcattcgcggtatataatgaatgtttttttgaagtgtatagtaggaattggctagtaacctcgatatcttcttcatgagtactatgctcattaacatgctctttaatacttttaaaaacttgatcttccgtatatacttcagcggatttttcagcactctctgcaaatgaataagtaggtgcaagaacagtttgtaatgcaagagagagagttaaaacactataaaatttctttttcatattttttttaacacattagattatggaatctagtgttaacattcctcctttttatattgtattttcactatgtatcgattttagtactaataaattttaacaagagaaaatcatgatgtctatatacatgagcgatattcataaaaagaattatttgaaaaaatgtaagagaaacaggtaaaaccttctgtattgacctgtaaacgcccttcaagtaaactaaagagagtttgcaaatgaaaaggtgataatgttgttaatttcaattaaaacgttacaagatgatcgttttttacgtccgctacaaaatattggcggcttattttttgaagatagtacgattggatttgaacaagaggaagcaaatcttatcgttgatatacacattgaggataatgtgaaagcatccgctcgattaacggatgttagcacaggaaatgtgtatgaagaaacattctcgaaagatttatctgctttcacagatgaaaaagagcgtatgaagcaagtgaagcatgttgtttcttatgtatatctttctgttcttcagcagttaactggtattgaacaaagctggggtattttaacgggagtacgtccgacgaaacttcttcataaaatgcttcaaaatggtatgtcaaaagaagaagcgcatcaagagcttcgtgaaagttatttaattcatgaagagaaaattgaacttcttcagcgcattgttgattgccaattagcagttgttccggatttataccgtttgaaagaagaagtaagtatttatatcggtattccgttctgcccaacgaaatgtgcatattgtacattcccggcttatgcgattaatggacgccaaggctctgttgattcgttcttgggtggtttacattatgaagttcgtgaaattggtaagtttttaaaagaaaaaggtgtaaaagttacgacgatttattacggcggcggtacacctacaagtattacagcagaagagatggatatgctgtatgaagaaatgtatgaagcgttcccagatgtgaaaaatgtgcgtgaagtaacagttgaggcaggtcgcccagatacgattacgccagcaaagctagaagttttaaataaatggaatattgaccgtattagtattaatccgcagtcataccatcaagagacactaaaagcaattggacgtcatcatactgtagaagaaacaattgagaaataccatttagctcgtgaaatgggaatgaacaatattaatatggacttaattattggtcttcctggtgaagggttagatatcttcaaacatacgttagatgaaacagaaaagttaatgccagaatcattaacagttcatacgttatcattcaaacgtgcttctgaaatgacgcaaaacaaacgtaaatataaagtagcaggtcgcgaagaaattacagcgatgatgcacgaagcagcagagtggacgcaaaagcataattacgtaccatattacctatatcgtcaaaagaatattttaggtaacttagagaacgttggttatgcaatgccgacgcaagaaagtatttacaacattgtcattatggaagaagtacaatcaattatcggacttggttgtggtgcatcaagtaaatttgttcatccgaagacaggagcaattacgcacttcgcaaatccgaaagatccaaaatcatataacgatggctttgtgaaatatacagaagataaactgaaaattttagaagagctatttgcataagaagaaagaggttgttccgagtcggaacaacctcttttttatcctgcagtaacgggcggtccgattatatcttgtcagtttttgtcggtaagtcgatatattcgaaaaatcgctgatataattcgagttgcgctgatatattttgaaaatcgccgatatatttcaagttacggtcgatatatctggaaaatcgctgatataatttcatttaccgtctagtggtaccgtatgtaaaactatgtcgataataatcagaaaaattagtcaaatcattaaaggacaatgtctacttatggacgaaatgatagatttatgaaagagaaaagggggaaattgttggcatgtacatgacgatagggagaatttttgatttatcagttggtaagtatccgaataaagaggcgttagtggaacctgaaaagaatattcgctggacgtataaacagtgggatgaacaaataaataaaacagcgcacgctctattagaagacggagtaagaaagggagatacggtatctgtttacttatataattgccgtgaatttgtaaacgtttacttagcctgtgcgaaaatcggagcgatctttaacccgattaatttccgcttaaaggcgaaagaagtatcttatattcttcaggacgcatcctcgaaagtcgttgtctttgaaaaagcagttgagtcaactgttgctataattgaaagagattttccaaatacatctttttggtctatagaaaacgataaaccttcctatgcaagttcctaccatgaaaaagtgaatgcagcatcttctgagaaagtaaatatcgaaattgatgaaatggattattgttcaatgctttatacgagcggtacgacaggtcatccgaaaggcgtattacatcgtcatcgcgaaatgactgagcatagtatgatttgtacgtatttccttaaatataatagagatagtgtagggcttgtcgttgcgcctttatatcactgtggtgaattaaacgctggaatcataccacgcattcaagttggcggaaagaatgttattttgcatcattttgatacagaaacagtattacatacgattcaagaagaaaagattacgacgttctttgcagcgccgacaatgtggaatatgttgttgcaaaaagatttagctcagtatgatttaacttcgatgaagattggtatatacggcggagcagcaatggcaccggcgttagtaaaagaatgtaaagaacgtctttatattgatcttgttcaaatatacggaatgacagaaatggggccagttgttgcgtttctcgtagaggaggatcaaattacgaaagctggttcagcaggcacgccatgctttagccatgaagttcgtattgtgaaaccgaacgaggatgcaccggcagaaccagaggatgtattacctccttatgaagtgggagaaattattttgcgcggcccaactatgatggctggctatcataatcgtgaagaagcgaataaaaaatcgatgtataaaggatggtatcattcgggtgatctaggctattttgataaagacggttatttattcgttgctgatcgcgttgatgatatggtaattagcggtggcgtaaatatttatcctcgtgaaattgaagatttccttcatagtcatcctggtatattagatgtggcggtacttggtgagccagacgaattatggggagagcgtgttgtggcagttattgtgaagaaagatgaaacaataacagaagctgatttagaaacgtattgcaaagaaagtgatgaactagcagattataaacgtccgcgtcattatttatttgtagatgaactccctcgtaatgcgagcgggaagttgcagaaatttgtgctgagggagtcattgaaaggtgcgaaaaaataaaaaatgaaggataccccatatctatggggtacccttcatttttctatattaaacagaagaaacaatatctttgttaattctcatttcttcttgttgaaggttaattagcgcatttgaaataaggtggaaaaacaaaatggatgtaatgtccaaaaagaaaagacaccttaaggtgcctctctccgacttgaaccatttcatttcatacgaatctatccgtattaccattacccctttgttatgagtgtaaacacatactataaagcagaatcgtctatatacactagattgttagttcacaaaagacaagagatttgagatcaatattgaagtgacgccacatcccctataataattgatatgttacgccttttaaaagaatctgctttatagaacgtgcccacaagttatattttactacatgtaatattcatttagtgtattttttgatgaatatgtataattacataaactgtatgaaaaaaagagagtatactctgatgttgtgtaataaagataaagcccgcctacggaatagggggcttttcttactttttataaatatttattccaattatattatcagatgagtctaaacgaatataaacgtcatctgataaaaggtgtgcattatatattctttgtttatatgttgatatctcgaagcgttttccatttaattcacattctagaataatcatatcgccatgttctttccaatttattaatttagcagtcgtattcatataaacctcctctgaatcattttatgaaaattagtagagatagtgtgagaaaggagtttatataacaaaaaaagacaccttaagtgtcttctttgattactataaaagtcgttgaatgaaataggtttctatttttatttgcgtgaaaagccttcttcatcaaggtattccgcagcttctggataagagttgaatgtaccgtctaagtttacaccagcgtacacgttccacatgtcatcctctgaaataagagtaagaatatgaccatcttcgttctgccattcttcttctttcgcaggttctacaggtgctactacctcttcttgtgatagaaggtcaattgatttctcaattactgaacgtaactcctctgctgaaaactcacggatgttaaccatgcctttatcatctgttttataacctttaataccacttgcatatacaaatccatttccatttgggtgtaaatgaaatacaacgttctttttatctaaacgactttcttcaaagtggaagtttacacgttttaatgatacgttctttctttctagttctgggaaagattcaataatcgataatttttcttcaaaagttagcatagtgcctccaagtatatagtaaaagatttaatttgttcattatagcatagttgcaattgtttccaaagataaggggaaaacttttcgttgaatacgtttacgtcacgagaatgtaaaaagtgagctaacgaatgtatctttttaggtgtacaatggaacatggactttatacaaaggtggtttttttatgtttcaaaaaatagcaaaggaatgtttagcaggatttactgttgcgattgttgcgttaccacttgcgattgcatttggtattgccgcgacaggaacgtctgagggtgcgcttgttggattgtatggtgcgatttttgcaggtttattcgcagcgttatttggcgggacacctgggcaagtaacagggccaactggaccaattaccgttattgcaacaggagttattgcgacgcacgggttagaggcaagttttattgcctttatgatggcagggttatttcaaattttattcggtgtatgtaagctcggttcttacgttcgatatattccgtatcctgtcgtttcaggatttatgaatggtattgcattaatcattattttaggcgaaataaagcacgtacaaaatagttttttacttgttgtgttaacgattattgtaatgattgtttctggcaaatggattaaggcgattccgtctagtttagtagcactagtcggtgtgacagctttgcttcctttattttcttctctactcgaaggacttacagtaaagttaccgattatcggaaatctttcactaaataaagtaattgaaaagattggaaccattccagaagcgatacctacgcttcatattccatctttaagtggaacaggaatagcagcacttattttaccagcgcttagtattgctttattaggatcgattgactcgttgttaacatcggtcgtaatggataatgtgacaggtacacgtcataaaagtaataaagagctcgttggacaaggtatcggtaatatgatgagcggattgtttggcggattagcaggtgcaggtgcgactgtaaggtctatcgtgaatataagaagtggcggtaaaacggcactttcggcatgtatgcatagtgttatcttatttatttttattatgggtcttggttcggtcgtacaatatattccacttgctgtattatcaggtattttaattttaactggtattggaatgttcgattggggaagcatgaaaaagatgcatgtcgctcctaaaggtgatgtcgttgttatgctcgtaacgatgattgtaacggtgaagttcgatttaatgattgctgttgccttcggtattattctttcgttcatcatatatatggtgaaatgtaaagaacgtaaaacttctatcgtaaaagaaaaagaagaaacgtacacaattcaagggccgctctctttcctatcagtagatcgtattttctctactttacaagatgtgaagtcaccggttgttttacgtatgaaagatgtgcgttatatggatgtatcaggagctatggcattattaaattttgttgagcaatcaaataaagtaggagcaagtgtaaagcttgagcaagtacatccgagtattgaaaaaacaatcgcagtaatggcaagcgatgaacagaaagagcaattgaaaatcttaagtgtttagatagtaattagaatatctcacaattttacataaattataatgtagagttgtgggatgtttttataatgtttttagtaatatgtatcgcagtgacagagaggaagggctcttttggcgtaacagaaacgcttatagtgtgtacatatataatggaaggaattagaaaaatattgtgaagagacaggcttaaatgggttcgcttttctattttgaaaaaaaaaccaagtattcaacctataataaatttgttatgataaccaatgggataaaatgaatccctatcgcttaaaacaatatgtttgagagtatatgtataaaagaaaagagaaaaaatatgaataaaacatttgtaaaaggagcagcaattttaaccattacaacttttttgtcaaaattgcttggtagtttttttcaaattccattacaaaatattgcaggagatgaagtgctcggtatttttcgccttgtttttcctgtatatatgattgctcttacattatcggtagccggagttccacttgcaatttcgaaactaattgcagagttgaacgaaaaaaataagcaaaaggaaattgcgaaattatttaaatcagcgtcaattattgggatagcatttggcgttttcggctgtttagtcattgtattattttctattgaaattgcgaatatgctcggtggacaagaaactagaatgccgttgcttattacttcattagcattactcattgcgccatacatggcggtgtatagagggtattttcaaggtttcggtgatatgaaaccaacaggggtatcacaggtcattgagcaatttgtacgtgtgttttttatgttaataattgcttacatactagtatcatgggataagagtaatactgttattactagtggggcgatggttggctcttttcttggagtcattagttcgcttatatatttgcgtataaaatataatagaagtccatactacaataaaagcaattcctattcgctccgagatttaagagaaaacggcaaaaagatattgcgggtatcgatcccaatcgctatcggagctttatcaatgccacttttaaatttagtagactcgcttacaataccgcatgtattacaaggatcatcaacagaaattcaagaacaatttggaatatacagtcgcggttttgcattcacacaaataattgttatttttgcaagtgcaattgtatttccgttaataccactcttaacttccgcattggccaaaagagatataaatttggcgaaaataacaattcaaaatacaaatcgactagcgcatgttttgacagcaccgttaacaatatggttgatggcattaaccgtaccgttaaatgtcggattgttcacagacgtaaaaggcagtagtatgttaacagttatgattggcagttcgtattttactgcggttatggtattatcaataggtgttttacagggcattaaccgttctgcacaagctgcatggattgttattggtgcgagttgtgtgaaagtcatgctaaacatgatgttcgtgcagaagtttggcatagatggagcggcgtatagtacattaattacttacgtattgatttgtattgtaaatcatttgtatattcgaagctatattgcctattctattcatttaaaaagctttttcggtgtgctagcaatagcatgtattttgggactaggattgtatgaattatgtaatgtgatagatgttacaacttcaagaattatgacgttattattcagtggtatagcattaagtattacaaccattttgtatggtgtatgtgctttgaaattaaaatggatatcaataaacaaaataccatttttgaaaagataaatatagaaatttaattttttattataattcatatgaactgataaagaggaaactatgtagggtatcaagtgtttaggtaaggaatgggtactagtttatgttagatgaaataaacggttacctagttttggaggagatttagggtgcgtttagtcttatcaggatattatggtttttataatgttggagacgaggcgattctacaatcaattattgaatcgttaagtaaagagaacccggatatagaactagtagtactatcaaatgattctaaatatacaaaggaaatgtatggtgtagaatcggtagatcgctgggatataaaagctgtttatcatgcgataaaaaacagtgatggagttattagcggtggcgggagccttcttcaagatcagacaagtacgaagagtattctatattatacgggtattatgggactcgctcgattattaaaaaagccgtattatatttattcacaaggaataggtccaattacaaaaggatataatcgtctattagtaaaatggaacttgtcaaaagcttcctatgtatcagttcgagatgaggattcgtttttatatttaaaagaacttggcataaaaaacgatattgaaattgttccagaccctgttttaacatggaaacggacaaaacaatcggattggttgcaaaagcattcgatacatggaaaagtaattgcggttagtgtgcgttattggaatgcaaaagaagattatataaaaaaattagctgcggcattaaaaaaattaaagcaagaaggataccaaattctatttgttccaatgcatgagccatttgatcaaaaagcttcacgtgaagtagtagacttaatgggagaagagacgtatatgcttccatataaaatggatatcgacgagaaaatattcattttatcacaatgttcattactaattggtatgcgtcttcatgcactagttttttctgctgtagccaaaactccaatggtcgggatttcatacgatccgaaaattgattcgtttttaagtcaagtgaatcagccagttataggaagtgtggatggcgaatggagtgctgagtatttatatgaaattgcgaaaaagcaattaatgcaacaaggaactgtgcagcaagagttacaattgacaatagatgagcttcggttgcaaggcaaacaggcaacaaagaaactcattgatcatatggaaaaaggcactttattaaaaaagtaaagtgtcttttgttttgttttgaatttaatgaaaattctaattaaaaaacgttttattttaattcctatttattatgctaaaatgattgtgattattatataatcaaatttgtgataataaattcgtagattacgaggaggataaccttgaagactttttcaaaaggtataacagcagtggcattaacgggatcattacttttaactcctatttcaagttatgcggcaaatgatgatattacaggacatatgtttgagacgaatatgcgctcacttattactaaaggagttttaatggggtatggagacaatgtatatgcgcctgataaattagtaacaagagcagagtttgctacattcatagcaagggctttaaatttaccgaaagctgattcgaatttcgaggatgtgccgaagacttacggtttatatgatggtgtaagtagagcatatggagcgaaaattattaatggtcgtacgaacgagacattctcaccaaatgatgtgattacacgtgaagaaatgtcgataatggtaaagcgagcgttagactataaaaatattaaagtagctgtaagtccgcttacctttactgataaagatagtattaactataaagagcatgtacaagttatggtggctactcaaattattaaagggtatccagaagataatacatttagaccacatttatcagctacaagagggatggcttcagctatgttggatcgcatgcttcagacgattgaaaaaaacggaaatagcaatcctgtagaaactaagaaatatgttgtgacaaatgtaagagaaaacggaacagagcaagaagtagagcgctataatacgtataaagaagcggttacggctgctcaaaataaaggtatgaatgcggtaaaatacgagaacgaatttttatggattaaagatggttttgcaagtgcgaaaagaataactgggcaaaacatcattaatatttatgatgagaatttatcaacagtatatacgtatattcagtatggaacagaattgaaagtattagaagttggcgaagatcgtgtgaaagttcaactttctggtttgacaggttatgtgaagaagaatgaaatcactttaattcctacaaatgaaatgaaacagtcgtcttattatgtgaaatcagatggatatttataccataaatattatacatataatacaagttcacctggatatacagaatttagatatggtgtggcaccttctttcatgaagcaaggacagcaaatgtatagtgtagatggaaagacatttggagacgaaactttctatcaatatttcaattatttatcattacgttcgaaaacagattatacagctgaacaactagatagttatgtgaaatcgattaaaccagactctccattaattggtttaggaaagaaatttaaagaagtagaaagcaagtataatgtaaatgcattattcttatattcattagcaattcatgaaagttattatggaacaagcgctcttgcaaaagacaaaaataatttatttggtttaaaagcaacagacgatagtccgtatggtaacggagaagcattcaattcaaaagaagattgtattgaacatgcagcaaaattatacatgaatgaaggatatttaaatccaggacattggcgttatacagcaacatatacaggtgataaagctgctggtttaaatgcgaaatatgcatctgatgcgaactgggggaaaaaagtagcggggcatatgaaccgttttgattcttatttaggtaaaaaagaatacaacaagtacaaacttgcacgtgtgatgaataacgtggaagtgaaaaagaatcctagtatatcaaatgagcgactgtatcgtttaaatacaaatgtagttgtcacagttactggtgaagagataataaatggaaaagcgtgggttaaagttatttcagataatcctactgtaacagaagcgtatattgcaaaagaaagcttagaatacgtaaaacattaattaaataaaaaagaaggtgctactaatatttcgtagcaccttctttttattcaatttcaaaatcaacaatgatataagcgagtataacaacgaagaaaatactaacggctggtgctgttaatacgtggccagacataaagccaatgccaagtgatagaacgagtgtgctcgctaatagcatatactttactttcatgattttcttaaagtttgtgatcatgcggataaataatttaataccaaagtatagaagaggtattaagtaaataaggaaaccgacaattccaaaggcgaaaaataggtcatggaagtccatttcaattaatttaattttatctgtgtagttaccagcgtaacccattccgaatagtttttgtgaaagcggtgcgtctttatagtattgtttgtatgtttttaagaatttgtcgcgatcactgtaaattaaactttttacttcagaatctgtaagttcaccttttgcatgtttttttgcatcttctggatctgctttaattacttttccttcttttcgatctttctcttcttgtactgattttttgtattcgtatatttgcatgtgaatgcccatattttttgcgataggagtatgcggtgtaagagcaattaaacctcctagtataactgcgacaacaacggtatttacaatatgtgtgaatccttttccttcttttttacgatttatcatatattcaatgaatgagaagaaaagtgctacgcctaatgtaataacaattgcgccatatccgactttcgttccgaccataatacttgcatacatcgcaagtattgttggaatccagtaatatattttcgagaaagaagttgttttatgaatcgaatataagacaatgattgggaacataatggcgaaaagagaacttaaatcatttccagcgaagaaccaacctcttgaaccgatttttgagtgaggatagcttgggaaatccgttccagtttgcattgcgacaatcattgtaatgcttaaaattaaagttgcatataagaaatatgtaatgattttatggaatacatactctttattttttagctctttaaaggcgataatatatccaaacagtagcacaattggatatacgctctttaagatgaatttaacttcttctccaaatgaaactggagatttaaccatcatattatttacaagaccgattgcgagtgcgatcccgagtaagcacaaatagaggatgtactttttcgcatcttgttgtttgtgatgaagaagtaggtaccctaatgcaagaagcataaaggcgaaacggactacaactccaactgttgcgctcatgtgtagtatatagattgaaaaagatgttaataaatctaaaattggttgaaacacaatgaatagcaataggaaatgtgggaagtagttatccgtttgtttcaacttattaaccatatgttcctccagttcttcattcctttattacaacacctaaaataggggtataaagccttttttacatagtaaggcgaatgaatttcaatatttgtttttttatcaaacttaagaatacaccatttcattgtaatggtaaatagatgaaaagcatggataaaccgactttaatttctatatttttcaacggaattgtatgttttatacggtaaatgtacaaattgcgagattattagacagaaaattgagaaaaaagaaggatttttcagtggttttctataattatataagtataatctttatggagaaaagaggggtatgtaatggaagtaacgagtaaaacagaatctgttattgtgaaatatgaaggtaacgttgcaacggttatggtcaatcgcccagaggtgttaaatgcgttagatgagccgacattaaaagagttattacaaaagttgaaagaagtagcggaaagttctgcgcatatcgttgtgttatgcgggaacggccgtggtttttctgcgggtggggatattaaatcgatgctttcaagtaatgatgaaagtaagtttgatggcattatgaataccatttctgaagttgtcgtgacattatatacgatgccaaagcttgttattagtgcaattcatggaccgactgcaggtcttgggttaagtattgcgttaacagctgattatgtaatggcggatatatcatctgttattgcaatgaactttattggaatcgctttaattccagatggaggcggtcatttcttccttcaaaagcgtgtcggtgaaaatatgacgaagcaaattatttgggaaggtaagaagttatcagcgacagaagcgcttgatatcggcttaattgatgaagtaatcggcgaagatttccaaacggctgtgaaacaaaaaattaatgaatggtcacaaaaaccgattaaagcaatgattcaaacgaagcaaattttatgtgaagtaaatcgctctaatttagagcaaacattgcaattagaaaagcgtggtcaatatgcaatgagacaaacagcggatcataaagaaggaattgctgcgtttttagagaaacgtttaccagtatttaaaggggaataaagtgaagtgaggattttgtccattcctcactgattattagctcgttaattcgggataaaggggagaaagtgctaacacattttagtataattgtgttagcactttttttaaggagtaatacatgaagaaaatgatcggtgttattactattattttgcttacatattctgctttgcatagtacaccatctttggcagttcggactgcgttgttttttgagggacatccaagtgttgcattttctgacggggtgacgaaagaaaaagatgtgaaaaaagaagcgattccagatgagtatcaaactctatatggtaaggacgaagacttagagcactatttctttccacatgtaagagcacatggatcaggaattgatatgttaagtgcgtgcgtgaagaaaaaatggtttttctataaagcagagctcggatgttattaaatataggaggatgaatgatgtcagcatataacaagttagtaagagatcgtgttccagagaagattttaatgtctggaaaaacatatacagcacaaaaattaacagggcaagcatacatacaggctttagcgaaaattggaacggaagaaattcgtgaatttgcttctatgaaagaacgcgaacatgcgctagattctcttgcagatgcactagaagttatcatctcattagcacgtgcagaaggtgcatcgattgaagatgtagaacgccttcgtaagcaaaaagagatagagcgcggtggatttgaaaaagggatttatttattagacgtttcagaagaatagttttataggaaaagcatagcgttactgagtaacgctatgcttttttgttgcaatgaagctaataatgaagaagatagctgttaatatccagccgattgtaatagaagtagtagtgtgaatggcataagagatttgtaaacaaaataatgatgctaaaaaccaaatgagtgcaatgtgtatatatttttttgatatattcatattttataactccttttatatactaaaaagaattttactacaatttagaaaattaagctatataagtagaggttttctggtgaattttgtatactgaatagtagagaaaaagaggaggaaacgacaatggcacatcatgcgaaagaaacgatggaactgattaaggagcttgtctctattccaagtccatctggaaatacagcaaaaattattaatttcattgaaaactatgtcagtgagtggaacgtagaaacgaaatgtaataataagggagctcttattttaacggtaaaagggaaaaatgatgcacagcaccgcttattaacggcacacgttgatacgttaggtgcgatggtaaaagaaattaagcctgacggtcgcctgagtctttctatgattggtggatttcgctggaactccgtagaaggggaatattgcgaaattgaaacatcaagtggcaagacgtatacaggaacaattttaatgcatcaaacatctgtacatgtatataaagatgcaggtgaagcaaaacgcgatgagaaaaatattgaagttcgtattgatgagcgcgtattttcagctgatgaagtacgcgaattaggaattgaagtaggagacttcgtttcatttgatccgcgcgttcaaattacagagagtggatacataaaatcacgtcatttagatgacaaagtaagtgttgcaattttattaaaattaattaaaagattacaagatgaaaacataacattaccatatacgacgcatttcttaatttctaataatgaagagattggatacggtggtaactctaacattccagaagaaactgttgaatacttagcagttgatatgggagcgttaggtgatggacaagcatctgatgaatatacagtatctatttgtgcaaaagactctagcggcccgtatcattatgcactgcgcaaacatttagtagagcttgcgaaaacgaatcatattgaatataaagtagatatttatccgtactacgcatctgatgcatcagctgcgattcgcgcgggatttgatgtgaaacatgcgttaattggagcgggtattgattcttcccacgcatttgaacgtacgcatgaaagttctattgcgcatacagaagcattagtgtatgcatatgtaatgtctaatttaattgaagaataatttcatagataatagagagctgattaaagatattatttttaatcagctttttatttggcaaagcgattaggagacatgtcctaatcgcttttttatcccgctatttgccgggcagtaagactcctacctcaaaattcagcgaaagcaaaaaagttagatgggggcgggctgcccgtaaaagcccgattggtgagggctgattaaagtttttatatacattcattataagttatatatatgcgatttttgttatacggccggaaacgtatttactatagatatataatgttatacactatgaaagggattaattaatagttaatattttttagttagcttgattaaaaaaattgtatgaatatgaagttttgagaggagatttatttttcatgaagtacaaagcaatagccgcaggtttattagcagcaaatttactagcacatccaattagtagtttagcagaaacgaagaaatttcctgatgtttcagatagtgcgtggtcaaaagacgcaatttattatttagtagagagaaatgtaattaacggtatgccagatggtaactttatgccatacggaaatttaacacgtgctcaggcagcaaagattatcgcaacagcaattggtgctaaaatagatccaaatgcaaagccgtcttataatgatgcaaaaaatagttgggcagcttcatttattgcagccatggaaaaagagaatattattaaagggcgagaaccaggagtatttgatcctgaaggaaaagtaactcgtgctgaaatggcagctatgcttgtaagagcatataatctgaaaagcaaagtaacaggaccagttcctacaaaatttgctgatttagagaatcattggggtaaagaagaagttaatattttagtagaattaaaactttcattaggtacagaggatggctggaaaccgaatgattctattacgcgtgaacaagcagctcaacttactgcgcaaacagataaatttagcaagaatagtgatcgtccagtagaaacaaagaaaatgtacatagatagaaaattcattacatatcacgcaccatcattaagttctgggattagtgcaaatcagcataatccacaaatggttgaaattaaagaagaacgagatggatggatcaaaattgcaacaagtaaaggtgataaatggacacctttagtagagaaaacagaagttattaatgaaggattcactacttatgcagaagcttcttcttcttcaaaagtaatgggaacacataacgcacaacaagtaactgttattgaagagaaaggcagctggattcgtatccgcatgggcgctggtttccaatgggttaataaaaatcaattaaatccagtgaagcaaggtaacttcttagaaggaaaagcgattatcattgatccaggtcatggtggagcggattcaggtaatccaggttattatgagaaagaaagtgaaactgtattagatgtatcactacgattacagaaaatatttgagaaaaagacaccatttactgtgttattcactcgtacagatgatacacgtccaggaacaagtgcttctgattctttaaagaaacgtgtagaatttgcacaaaaaaataatggggatatttttgtaagtattcatggtaatggcacggaagagaaaaatggacaaggtacagaaacgttctactatgaatcagcgacagcaagaggaacaaatcctaacgtatcagaaagtcgtttactagcagaaaaaattcaagagcgtcttgtagatgcactgggaacaaaagatcgtggtgtgaaaaaaggcgatttatacgtaattagagaaaatacaatgccagctgtattagcagaattagcatttgtagataataaaagtgatgcagataaaatagctacaccagcgcagagacaaagtgcagcggaagctatttatcaaggtattttagattactatgaagaaatgggtaacaacgtgtcttctttccgttaataaataataagagattgccattggcagtctcttttatttattaacgtttctctttatttccggcatatgatatcatttaattttatatacaaaagaaaagtatttgagtaattgtaatcataacaattttaaacgatagaggatgataatagattgaataatcacagtaaaacacctgcctgtatatatacgtatgcatttcgtgaggaggagcgtgctttatgttacttggaaatgcgctcgttctttggaatggagtcccacgttaatattttaaaaagtgatgtcaaaattgacccgagtagaagtgcgtttattaaagagcgaattgaagttatgtatgaaggggacgacttagaaagcattttaaaacaagtggaacaaattgatttggcgggagcgacgttcaaagtcatcttcgttaaaattaatgaccttgttggagagaataaaattgaatatggagaaagacgtcttattgaaagagacctcggcatgcatattgaaggagaagcggatgttcgtaatccagagcgtgtattcgggattgttcctcttggaggacgctggtacttcgggcactatgtagaaagcgaaccagtttggtatcatcacataaaaaaaccgcatagttattcgacatctcttagcacacgtgttgcgagatcagttgcaaatatcgctgtaccaaatccagagggagtacgagcaattgacccgtgctgcggtattggaacagtagtagtagaagcactttctatggggattaacatcgttggtagagatataaatccacttgtagttcttggaacgagaaaaaacatcgcacatttcggatttgaaggaacagtaacaaaagggccgatcgaggaaattactgagaactacgacgttgccattatcgatatgccatacgacttatttacgcatgccacaccagaagatcaactatcaattctctcaagtgcacgccgcatcgcgaaaaaagtagtcgttgtcacgatggaaacaatggacgacatgatccatgaagcaggattcgaaattacagatcgctgtattacaagaaaaggatcatttactagacagattcttgtttgtgaataagaaagaaaggtcacccgtttgggtgaccttttttgtttgtattgatgtgtaatcggttggtggtttaggtagatgaattagcgaaatttgtcggtaagtcgatattacatgtcgaatcgccgatatattgtgttgaatcgctgatatattccgagaatcgccgatatcgttacattagaatgttactgttcttttaatttctcttgttgtgcaagtagtaaattgcgcaagatgtgcccgcggtaactttctagttttcgtccttcatgatagcgtacgcctaatttttttagttcagctacgtaccagccctttgttccgtaatacattggatcacttcctttttgcttttgaacagtatatgttgggggtggaagtaactttccagtgaaaataataagactggttgtatcaaggggctccataacatagcctctggacagtgtataaaaaaatagacagtaatgtatgcttttttaaacaatgtatacaaatttatatcctatgcgttggcatgatatttgcaataaaaagagtatcaacatataggggagagatagaaatgaaggttagtaaagtgtacacaacaattgatgctcacgtagctggggaaccgcttcgaattattacgggcggcgtgccggaaataaaaggagacacgcagctagaaagacgtgcgtactgcatggaacatttggatcatcttcgcgaagttcttatgtatgaaccgagaggacatcacggcatgtacggttgtatcattactccgcctgcgagtgctcacgctgattttggcgtattatttatgcacaacgaaggatggagtacgatgtgtggtcatggcattattgctgttattacagtcggaattgaaacaggcatgtttgaagtgacaggtgagaaacaacagttcattattgatagccctgctggggaagtcattgcgtatgcaacatataacgggagcgaagtagagtccgtatcatttgaaaatgttccttcctttgtatacaaaaaagacgttcctattaaaatagataactatgaatttcaagtagatatcgcgtttggcggagctttttatgcggtagtagactgtaaagaatttggcttgaaagtcgatttcaaagacttatctgctattcaagcgtggggcggtaaaattaagcactacatcgagagcaaaatggaagtgaagcatccacttgaagaaggattaaaagggatatacggcgttattttctcagatgaaccgaaaggagaagacgcaactttacgaaatgtaacaatctttgctgatgggcaagtagatcgttctccttgcggtacaggaacttccgcaagaatcgcaactctttttgaaaaagatgctttacaaaagggagaaattttcgtccatgaatgcattactgacgggaaattcgagggggaagtattgtcggtaaccgcagtagatacatatgaagctgtcgttccaaaagtaacggggcatgcctttattacaggatttcatcagttcgttgtagacccgagagatgatttgaaccgtggatttttgttaggatagaaggagggggtggaaagatatgttagtcataagcgcgaacgaacaaagaaacttagtaaatatgaatgaagttattgaatacgcggcgcttgctttaaaagaattttccgcagaaagaacgattacaccaataaggggctcattaccatttgcgaacgagcgaaatacggcattaattatgccttcagtagcggaagggcttgaggcacttggcttaaaagtagtaacggtagtcccgcaaaataaacagataggaaagaaaacgatcaacgggattgtgatgctatcagactttcaaacgggagaaccgctcgcacttttagaaggatcgtacttaacgatgattcgaacaggcgccttatcaggagtagcgacaaaatatttagctcgtcataacgcaaaaactttatgcattatcggcacgggtgaacaagcgaaaggtattgctgaagcaatatttgcggttagagatatcgaaaaagtcatcttatacaatcgcacagaagaaaaggcgtatgcatttgcggaatatatacaagagagattcaacaaacctgcatatgttcacacaaatgcaaatgaagcaataagcgaagcagacatcatcgtcacaactacgaacgcatccacaccagtcttctcagaaaaactacaaaaaggcgtgcacataaacgccgtcggctcattcaaaccgaacatgcaagaactaccatcccatgccatcgcgggagcaaacaaagtagtagtcgaatcaaaagaagcagcactagacgaaacaggagaccttcaagttccgataaaagaaggtctattcaaagcaaacgccattcacgctgaacttggtcaaattataagtggagaaaaagctggacgcgaaaataatgaagagattactattttcaaatcagttggtttggcagtagtagatattattgttgcaaagtatttgtatgagaaagcggtggagtgcgggattgggaataggattgagttttgagggactgccttttggtggtcttttttgttgatgtggatgtgctagtatttataattgaatccttttaatattatgttgcaatgtatgaattctgtgcggacatcaaatcattcattcaattggtatatgaaaaaagttgcccctctaattattagaggggcaactttttaccattctcgccattcttctgttatatcttcctcggattctaagccagctattcgtgctgctgtatcgataaattcatagagatcttctctttccattgtttcaataaaatagtcatgttcgtcatttaattcatttatgttaagaacaacctctttaacaacatgcattatttcaatttcagttggattttttcccaatttctctaaattatttatgtaagtatcaagaactttatttgttgcacttatattttcttcagtgaaaaattccccatcttcatcattctcaatccattgggttgttggtttgttttttttcagttcatcaaatgtcatgataacctcctaaatgtgttttttgtctttaatcccattctacattttcggtcatatataacaatcattttagagtttttttgtaagctactagttttttaactcattttacgaggtaacctattcgtggtcttcttttttaatcctccttataaatatattttatggcaagaatgtattagtagatttcaaactttccacatttacaaaaaagtttgactttacatacaggtagtggtaatttaaaacttataagaaaactcgggattaattccgagttttcttatgggtataactagtttgagggggccgaaagatgaaacggaaattatttgcattaccatttgttctaatactacttattgcattagcggcttgttctggggaaaaagattcttcgaagcaagcgggcactagtaaatcagggactccgaaagatggaggagggttaacgattggtgttagcgataatccagatacgatgaatccgctttatgcgaatgatcgtgtgtcattaactgtgcagcaggctttatatgcgccgctatatcatatggaagacggtaagaaaaagtttgttcttgctgagagctttacgccttcagaagatcaattaacgtggacattgaaattaaaagataatttgaaatggcatgatggtaagaaaattacatcagacgatatagcatttacattccaatctattttggatgagaagcaaaatagctcaagtcgtgaaaactttatttttaaaggaaagccgcttgaggtgaaaaaggtagatgagttaacaactcaattcgttttaccacaagtaagcgcatctttcgaaggtgtaatgaatgatttcttcccaattccgaaacatgtatttgaaggggaagcagatttagcgaagagtaagaaaaacttacagcctgtaggatcagggccgtttaagtttaaagagtataaatcagatgagtatgttgcattagatcgatttgatgattatgtaggtgggaaagctaaattagactctatcgtataccgcgttgtaaaagaccgtaatacagcaaatgtttcactgcaaaatggtcaaatcaacatgaaaatgattgagccgcaagactttaaaaaactagatagtactgggaacttctcaatggtgacattccctgaaggtagattattctacttatcttataacatgaatacagatttgatgaagaaaaaagaagtgcgccaagcaattgcgcatgcgttagataaaaaagaaatgattaactcagcattcgtttcgggtgaatttgcagaaccagcaaattcaatcttaacgccagacgctatgtattatgcgaaagatattaaaggctataagtatgataaaaaagaagcgaaagatttattagcaaaagctggtgtgaaagataaagaaaaagtacgtgtgatgtatgtaacgaataataaaattatggaaagcttagcgctttatacacaacaaaaattaaaagaagttggcttagaagttgaactaaatgcattagatgctagtgcggcaagtgaaaaaggcttagataaagagaataaagaatatgacattacatttggtggttacataatgggacctgagccagattcatataaaagcctattcttaagtaatgctgaatacaactatgcacgatataaaaacgctgatttcgataagttatgggaagaagctgcagttgaaacggataaaacaaaacgtgcagagctataccataaaattcaagaaacagctagagaagatgtaccttatctaccaattgcgtatccgaaagcagttattgcagtagataaaaagtttgatggattaaaagaagcgaaagcaattcctgtcacaatgtttgaagatctatctaagatttatgaagtgaaataagaaacaataaagaagctggtggaaatcagcttctttagcttgaggggggaagtttgtgtataaagtaattgcgaagaggcttttaaatgcaattccgcttttatttgttatttctattatttcttttctattaataaagctagcgccgggggatcctgttcgaaactttgtaacgccaaatatgagtccaattgatgtggagcgtattcgtaaaagtttaggactagatcaaccaatttacgtgcagtattttttatggttaaaaaacattttaacagggaactttggttattcacttcaaaatcatcgtcctgttttagatcttatcgcagaaagattacccgcaacaattgggttaatgggatcatctttactcgtctcattcgtaatcgcaataccacttggactatttacaggtgtgaaaaagaattcgttctttgaccgcattgtaaactttatttcatatgttggtatttctatgccggttttctggtttgcactactattagtctacttattctctttaaaattgaacctacttccgagtatgggtatgcgcaccgtaggtaaagattctgtttgggatattgtgcaacacggcattttaccttgtatggtgctagcgttccaaaacgtatctgtttatatgagatatattcgttcaagtacgattcagcaattagaagaagaatatgtacaaattcaatatgcgtacggtgcttcaaagaaaacggtgttatttaatcacgtacttcgaaatgtattaataccgatcattacaattttcggattatcgattccaagtttagtaggcggagcatttattacggaaacagtattttcatggccgggtcttggttcacttggggtaaatgctatttttagatttgattatccgattatcatggcaattacattactatcatcattcatgttaattctcggtaacttaattgctgatattttatatggcgtagtagatccgcgcattcgaatgagggggtgatttggaatgaataataggagatttcaaacgataaaacatagctttacgaaaaataagtttgttgcaatgggagttattatacttgcgattttaacggtcgcatcaattttcgcattcgtatcgccgtacgatcctagcaaaatgtcgattccagatcgcttacaagaaccgagtatgagtcatcctttcggaacggatgattacggaagagattacttaacgagagcgttatatggcggacgagtttcacttgcggtcggttttcttgcgatggttgtttctattacaatcggtaccgcagttggaacaattagcggatattttggcggaaagttagacaacttcttaatgagggttgttgaagtacttatgtcaattccatcattctttttaatgctactattaaatgcgtatttaaaaccaggaattacgacgttagttcttattatcggattactaacatggatggacaccgcccgtattgtaagggcagaaacgttatctgtaaaagagcgtgagtacgttttatacgcaaaagtatcaggacaaaaatcacttatgattattgtaagacatatcattcctaacattttatcaaccattattatcgctgcgacattaacaattgcgacatcgattttaatggaatcatcacttagtttcttaggtttaggtattagagaaccagattcttcttggggcagcatgctaaacaatgcgcaaggatatattggtgaagcttggtatttaacactcttcccaggattccttatccttttaacggtacttagttttaacgtaattggtgaagcattgaagaaagctttcgcaccaaaaggagccggacatgaaaactaaagtgttaagtgaagggagtgagaagcgtgtctgaaaaactactagaagtgaaaaatttaaagacttcttttttcatagaaagtggcgaagttgaagcggttcgcggcgttacatttcgcttaaataaaggagaagtagtcggtatcgttggggaatctggaagcggaaagagtgtaatggcgaagtccgttatgtctctcgttacgtcaccaggaaaagtgaaagaaggggaaatcctttttcataatgaaaacatactttctaaatctgaaaaagaattgcgttctattagaggaaatcaaatttcacttatctctcaagacccaatgtcagcgttaaatccggtcgtgaaaattgggaaacaaatgatggaagtaattatacgtcatcaaaaagtgaaaaagaaagaagcagagcaaatcgcggtcaacttgttaaaacaagtcggtctttcttcaccagaagaaagggtgaaacaatatccgcatgaactaagcggaggtatgaagcagcgagttatgatcgcaatggcgatgtcttgtaaccctgaccttctcattgcggacgaaccgacgacagcacttgatgtaacgatacaagcacaaatactagatttaatgaaaaacttaaaaaacgaaacgaacatggcgttacttcttattacgcatgacttaggaatagtcgcacaaaactgtacacgcgttatcgttatgtatggcggacttattatggaagaaggacctgtacttgatattttccaatcgccgaatcatccatatacgaaagggttattaaactctctgccgaaaatatcgaacggcgtaaaagagagactcgcgccaattcaaggtgtaacgccaaacttattaaacccgccacaaggttgcccattcgcagagcgttgcccgcatgcgatggacatttgtgaaaaagaacgtccaccatattttgaaatcggaaacgaaagacgttccatgtgctggctaaacgatagggcggtaggtgattttcatgcatgaagaaaacttaattgaagttcggaacttaaaaaaatactttcctattaaaaaaggactattcggcagaaaaacggagcaattaaaagcagtcgatgacttaagtttcacaattaaaaagggtgaaacattcggattagtaggagaatctggctgcggaaaatcaacgacaggaagaagcatcattcgtttacaagatgtcacttcaggtaacgttttattcgacggaaaagacatcgcaagtttaaaggaaagtgaactaaaagaatatcgaaaacgaatgcaaatcattttccaagatccatacgcatcattaaacccagcaatgaacgtattccaaattattagcgagccaatgaacattcacggctcttacgaaaaagaagaacaaaaagaaatcatattagacctgctcaaaaaggtaggcttaaaagaagaacatttatatcgctacccgcacgaatttagcgggggccagcgccagcgcattagcatcgcgcgcgcactatctgtaaaaccagactttatcctatgtgacgaaccaatctcagcactcgatgtctcagtccaagcacaagtcgtaaacatgctgcaagacatccaagaagaaactggagtcacatacttattcatcgcacatgacctatcgatggtaaggcacatatcagaccgcatcggagtcatgtacttaggaaacatagtagaaattgccgacagtgaagacctatacacaaaaccggcacatccatacacacaagcactactctcatccatgccagaaccagatccaacaaacattggcaaagaacggattatcctagagggagaagtaccgagcccactaaacacaccatccggctgcaaattcagaacgcgctgcaaattcgccactgaaaaatgcgcacaggaagtaccgaagatggttgagattgcgaaggggcatgaggtggcttgtcatttgttttagagggagagcactaggggggacctggtgcttttttcttttgtgttggggtgtgggattggttgtagattaatggtcagcgactgtctatatttgtatctcctatcatataattccctttattctttaactataatgctgggaaagcacgtaaagtaagacaaagtattaaaaatcatcgtgatgaagtgtatcgtattgatgtatgtattgtagaagatccgatggaaagagaaatttacgaaacatatatgattaacgaatttcaagcaaagtataatgtggataaagtattttataaataacatcaacgtaaaacatgatcttggtactacatcaagatcatgttttttatatgtaataaaaacaattgattattcttaatcattcgacaagatgcaacaatttaagatcatattttttgctatgataagtaaggaatttacatatcgtgttattgggggataaaaagagatgttgaaaaaatttactacatgtattttaggtggcgctttagtattcaatttatctggttgcggcaatacatccgacaaaacttcttcagaatctaaagaaaccaattctaaacaagaagaaaagaaagtgcaaacaaccgatgaggcgaaaacgaaagaaaatacaaagcagaaaaatacagaacaagcaaaagagaaatcaaaaataaaagaaaaagagtatgctgtaaacaaggattttcatacacctaaatttgatgtaactgtaaaaagagttgtagaaagagataaggttggtaaagagagtataggattccaaaaacctgaagatggacatgtctttattgttgtagaagcagaagggaaaaatatcacaaacgaaccgatgaaattagccgttttaccatcagtggatttagtggatgaaaatgataatgcttaccaaagtgatgtgttggcagctagtagttatgcggttgaaaaaggcgagacctctagtattactaagggattaaaaccaggggaggtaatgagagaaagtaaagtttacgtgattaataaagaaaaatttgatacaggaaagtggtatgtagttgttaaccatgagtataaggaacaaattaaatagtgtttatttatgaagaggagatggctcctcttttttttacaagttaacacagaatttctttataatgtagaaatttaatgttttcgaaaaaaagaattgacttctacattagttgtaactaaaatggttacataaagatgtaattaatttagttacaactaatatctgctaaaaatatgatttatatatttaattaaggatggtggtccatacgttgccacccggtgtagaaagttactaacacattcaaatcaatgcatattccaagctttagtattttctgttacggggcaataaggtgcaatgttatcttttgttaaaaaccttggtggatctttctttggaaatattagttttggggaaatatagtaaggtatctaaaaaagaacaaggtataaaaatatgtacttatataaaccaaaaatttagttgagctggataataaaaaaggtaggagatttaaatggagacgaaacaagataatcttatttacgtatgggatgcatattgtggatggtgctatggtttttcagaaagtattaaaggattttacaaaaaccacactgaattaccattaacggttttatgtggagggttatttttagataatttaccaatgaaaaacttctcatatatagaagaaggaaataaaagaattaatcaacttacaggtgctgaatttggtccttcatatcaaaaattggtggaggaagggacttttaaaatgaattcgaaagatgctgcaattggcttttcagctttacgctcattagcgccagaccgtttattagaattcacttcggctatgcaaaaagcgttttattatgagggccaaagtctgagtgatcctgaaacatatcgcaagattgcaatcgagcatggtttggaccctgaacaagtgttagaacgtttaaacgctcaagaaacaataatagatgtccaaaatgatttcaataaagttcgacagcttggtgttaatagctatccttcattacttttacaaaaggataatcaaattattcctattggtggtggcgtaatgacgccggataaaattgaagcgcgttttaaaaatttatattaagaaaatttaggatatagtagcaaacatgttatcttaggccacctgacattgatctccggaatattcgctagtactattacactttcagataaatgggagtgggagattttatcggaacaagataaaaatatgataattagttaataactttaacaaaaggagaataacatactatgtttaaaacaatcgatacaaatcaaaaagatgtgaaattaacggtgtttagttcggacgaaaaaagctttatggtcacagcaacattagttgagaaagcaggacatgcatttttaataaactcaaaatttactcaatctgattcgaaagaaattgttgagtatctgaaaaaaaacaacttatctttagataaaatctttattattcatggggatccagactactactttggattagagagcattaaagccgtttacccagaagctatagcgtatgcaacagagtctactgttgaacatatcgttcattctgtcttagggaaattaaaagtttggaaagacgcccttggagaaaatgcaccaagtaacgtggtattacctcaagtatttaaagaaaaagcgattgattttcaggggttaacatttgaactagtaggcttagatcattacagaactagcctatttaataaagaactaaaagtattaattggtggtatcgatgtatttaacgaaatacatgtattcttagcggatactagctcaaaagcggctatggaggcatggattgagaacttgaaagtattacaagcattacatgctgacataattgtgcctagccatggatcaatcgaaaaatccctaaataatcaagcacttactgcgacaatggattatctaagaacggcggttcaagcttctgaggaaagtggaacttcaaaagattttgtggcaaaacttgaagcagcatatccaggctatgcaaataaaggtgtattagaattaagtgcaaaagttgtaacaaaagaaatgccttggggttaatgatatgaataaatatcaaaaactattacatgaaacgtatgtgttaactggcgaagggaaattggatgcgttcaaaacgtatttaagtgaaaatgtatcttggacagaagctgctgggtttccatatgcaggtacttatataggtccagatgaagtagtgaaaaacgtacatgaacgtcttggcacagaatgggatgactatagcgctaaagatgaaatttatgcttttaataacaatactgttatcgtttatggaaaatatagtggaacatataaaactacagggaagtcatttgtagcagatttttgtcacctttataagtttgatgagaacgataaggttaagaagtttattcaaattgtggacagtgcaactgttaatgaggtattaagttagagttaatcgtttctaatatgccttgtatagggggaggttaggataaatgaaattcctaacattatccctgacattacattttggggaaggtttctccttcttcaagctttttatagaagaaaacttatttaagtagaagaggtaggtatatatgaaattagagaaaaatttaatcataacaattatttctgtatttattttaggagtagtttcgactttggtatatcaagcttccaccggtaataacaaagggaactcaataaagagcgaaaatgtcgcttctgtatcaaaagaagtaaaagaaaatgaaaagaataaaaagatggtagttgatttctataatgaagtttttaacaaacataatatcgatattatccctaaatatgttagcgaagattataagcaacataatccttttgttgctgatggacgaaaagccttcatggatttctttaaggaggattttgttaaaaatcctaattcctctgcagagattaaacgtgtagtagctgaaggggatacagttgctcttcatgtacactctcgtactaattctcaagataagggagttgctatagtggatatatttcgtatcaaggatggaaagattgtcgaacactgggatgtaattcaagagattccaagtgaagcagctaatgataatacgatgttttagatagaagatatatttaataattgtttaattgatagtgctgtatagagtttagaaatttagataattagtcatcaaatttggaaatcatttaaaaatagcatattaaatgatggcacaaattaatacgaaatagctctttaataaaaaatcctactcattaaaaaatgagtaggattttttattaaagaatagtgctaattttgtggttcggcaccatctaaatttggaaaccatgaaagtataggtactctatatccacgtaaagtaaaatcgtaattttttccttcttttatgtttgcttgcagatccactgaatgaaacttcatcataagaaggctatcctcattagaaataactttttcggttccatttttttgctcaacctagtacaatcttaccaatttaaaaaagaccaccattactgaagtgcaccccaattgttagacacataactaacaattggaggtgcattttttaacttttttaaaaatcaaccaattatcaggattcaaattgtatgatttaatatgaatcttttctttttttgttggctttttaccatttttcaattaactcacctcccttcgatctgaaaccttacggttcatttcgtataacttagttttacttctgcgcattttttaacaatttcatgccctttcataattcgtgttgctaatagtactccgttcatgcttttcactctccttaagatttattgacttaatggatatatgtaagttaacttgcttttatctactcacaatctgattaaaatgcttttcaagaaactcttgcattctatcagctataaacaaccactttttccctctagactctgggtaataaacaaaaccaccgttattaatatccaatatttttttataacaaggtttgtaaagaatattttgtgttaaccaaccataactatatccagtagctttttttaaatccttcatttcccaccatgttttttcttttttcacttaaaatcctcctcataatattgagatactcgatattaatctataaaaaaaagatactcaattggtaatcctaacttttttttaataacttgcatctcataatccgaaaatgaaaatttccctttttccttcgcagagtatgcgtctctattgattcccaatgcaattgccatttctgcaatcgtgatatcacgtgccattctttctctttttaaaattcgtttaggttttaaatatttctttctaatttcttctttaacagtcattgtgtcacctccgaattatccgatgaccaaataatatcgcatatctcgatattattcaagctatacacaaaaataatattacgatgtacaatatttttattgtgtcacgcgttattttagagtatactatccttatcgtatcaatggatggaggtcacttgaaattgaaaaaaaatattctgggtccagcgatcaaatatttacgtaaatacagaagaatgactcaaaaagatttagaaaaagttactggttataaacaaagcaccatatctggtcatgaaaatagaaatagcacacttgatgagttagatatacaaaattatgcaaaggcattacaggtaagtccccaaagtttctttacgatagcagaaaagctggaaaaaggagaaagaattactgatgatgatgtatcagggattatcactataaacaaggatcaggaaacagaagatgatcctcatatggtaatcgcagctcacatggaagataatctaagcaaagaagaactacaagaggtaatggacttcattaattttgttaaaagtaaaagaaaataggagcatttatatgaacaagttggaaacacttatagcacaatatccagaaataactttcaactttaataatgagatgcctaatgggttaagtggactttgtgttggtagtgaaatatatatcaataataatcttaatcaaaccattgcagaaaagtacgtaacagttagtgaggaaatagctcactttgagaaaggcataggtaatataattaaacaggaaactattaccgaacgtcagcaagaattccaagcccgaaaaataggctgcctccgaattgttacaattgatgctttaatactatgctatgaaaaaggcatccaaacaccttgggatatagcagaagaacttgaagttacaacggcttgtgttatagatgcatttgaatatatccggatgacaaaaggagtatctttttatcataaaaattacttagttcatttcttaactgatacacatataaacattcaaaagttttagcgaattttattttgaatggaggagaaaaacttggcaagctttgaaaaaagagcaactggttggaggtatcgcgtttcttataaagatggagataaatacaaaacaaaaacccaaggtggattctcgaccaaaaaggaagcagcaattgcagcaagtgaattagaaaaaaaaataagtcgtggacataatttaaatgcagaagataaactattctccgagtatatgagagaatggtttgaagtatataaaaaaggaaaacatagtctatcgcatgagaaaaaccttttacaatctgtaaaattagtcgaagaacattttattggtgtccgtatgaaagacttaaatagagttttatatcaaaactttttaaatgaattatctaaaaaacgtgctaaaatgaccgtcaagaaaaaacataactgtgttaaagcatgtataaaatatgcaattgaagatggaattttgcatagagaccctacttacaaagctatcatacatggagagaatgaaacaaaatcagaagaattaaagtttatcaatcaagaagagatgaaaaacatagtggatgaattacgcgcaaatttgacaccacaatacatttcaagatatataattctttttgccatagccactggggcaagatttggtgaaataatggggatgacatgggactgtatagacttagaagaaagaacaattacaatcaataagacttgggattatcgtgataagaatgactttggtaacactaaaaattatcaatctgtacgtacaataacaattgatcaggaaacagtgagtatgttaaaagatttacaaaaacaccaaaaagaacatgctctgaaaacaggtttaaggaatactaaaaatttgtgctttattaataatcaaatggaagttataacaaataacgctgtaaacaaagttcttaaaaagatttgcgcaaggtgcaatgttaaaccaataacatgtcattcattacgccatacacatgcatctatactcttatacaatggcgttaatataaaatacatttcaagaagacttggccacaaagatattgtaattacactacaaacatattcacatgtcttagatgaaatggaacaaaaggaatctagaatcgttgatcaaactatgttgaatttgttccaatcagttatataaaacgtgcaaaaatcgtgcaaaaaaaattctaaacgtataagtttatttgaaatagatagttcctacaaaattatataagtccagttatatcaaggttttaagaaaaaacatgtgattatttaaaaatctaaaagcgcgcccagagggattcgaacccccggcagacgtggtaccggaaaccaccgctctatccgactgagctatgggcgcatgattatagaaaacacttcattttcttctcataataatagcaataaaatccatctaaatcaataaaaatatccccgtaataccttatgcatcttagctaaaagcatataaaatccattccacccctaaattttccaatcataaattctccccaactcacaaattataatctttgaattgatattccaaagggggcttcattcaatgactgtaattacaaaattaaagcagactgtttctggattaaaaagtgcacaagctagcttagagggattcgctcttgatacggataaccaacaagctaagcaacttttccaaacagctgcgcagcaaacacaaacgattatcgattctttaaacccacgtgttgaagaagtccaacaagaagaaccacaatactcacagcaataacgaatcagtcttgctgtgaaatagaaaaaggatgatatgcagtcatcctttttctatcacattacatattgcaatagaaatggaatgatgattatgcgaaagattggacttataaccgcgttatttatacttctatttagttcttttaccggttgtgatcatagcccattagataaaaaggtaaagaaagaagaaacaaaacgaacagaaaaagaaaagggtccaaaattaacaaagatgagtacagaatcctttaatcaatctatatcgcaaggagctaagaaaaaggccctcgctatggatgaaattataaaaagcgcagcagtgaattcaaatttagatctctacatagcggttatacctgagcatcatgaaaggtttggattaaaacctttgcgcaagaaacttcaaaagcaactaagtgatgaatatcctactttcgatgttcgtgttagtacagataaaaaaatctttatgttactcgaaaagcttgcaaacaaaattaagaaaaaagaagtatctaaagatgagatcaaaaaacagttaaagctaatcggatcagaaatggaatctaacacttaacgctttcgaatagaaaaggaaggattgcaatgtcaagtaaagataaaaacttaacccctgtacaacaggaatacaaaaaatttgagcaagaacgcgaaccgaaacgccctgttctaaaaaattgtttaaaggcctttttcgttggtggttttatctgcctaatcgggcaactgatatcaactttttatattacgtatttcgattttaccgaacgctcagcaggaaatccaacagtcgcaactctcatttttatctcaatgttgctaaccggattcggtgtatacgatcgtctcggtcagtttgcaggcgctggaacagctgtacctgtcactggatttggtaactctgttatctccgcgtgtattgaacaccgaacggaaggttttgtactcggtgtcggcggtaatatgtttaaactagctggttctgttattttatttggtgtattttccgctttcgtcatcgcacttattaaaactattctcgttcaatggggagggctataaatgttacaaggacaccgaacgtgggtatttgaaaacaaaccagtcattatttcaacaggggttgtcggtggaccatttgaagcaaaggggaacatcccagaagacttcgatatccttcatgaagatttatggctcggacaagattcctatgaaaaagcacataaaattttattcgaagaggcttgtagtcgcgctactgaaaaagcagaacttcgtaaagatgatattcagttcgtactcgcaggagatttaattaatcaaattacccctacaagctttgcttgccgcacactgggcactccttatctcggattattcggggcttgttctacttctatggaaggtttagcacttggggcaagtatcgtaaatgcaaaaggtgcaaaatatttattaactggagcttcaagccataatacagctgtagaaaaacagttccgctaccctaccgaatacggtggacaaaagccgcctactgcacagtggacagtaaccggagcaggagccgctatattaagcgatactggacacggtccaagagtaacctctgcaacaatcggccgagtggttgatatgggattaacggatccgtttaatatgggaggcgcaatggctccagctgcagttgatacaattgaagcccatttacgtgaacgtcaaattgatgcctcttactacgatttaatcgtaacaggcgatctcggacatgtaggacgcgaaattgcttatgacttactacataaacacggaacgaaagtaacgagcgaacaatttcaagattgcggaattatcatttatagagaaggacaacctgtcatagctggtgctagcggacctggatgttctgcaacagtcgtgtacggtcatttattaaaccgaatgaaaagaggagagttcaaaaaaatacttgtcgttgcgacaggcgctttactatctccacttacattccaacaagaagaaacgattccgtgtatcgctcacgccgtttcgattgaatttggaggtgcaacgcaatgatttttttctgggctttcgtcattggcggactcatatgtgtaatcggccaacttatgtttgatgtcggcaaactaacacctgctcatacaatggcaacactcgttgttgctggagctatattagatggatttaatttgtatgagccattaattgatttcgctggagccggggcaactgtacctattacaagctttggtaatgccctcgttcatggcgcaatggaagaagctgcaaaacatggcatcgttggcgttattaccggcatgtttaaagtaacgagcgccggtgtatcagcggctattattttcggcttcattggagcattgttattcaaaccgaaaggataagaggtgtttatatgactgttatcgctagcgtaaaaacttgccttgctagtgtaaggggcgctcaagcaagtttaagctccctttcattaaattcacaagacgaagaatcaaaacgcgtatttcatgaatgtatgttagaaatggacagcgtcatcgctgatttaaaggatagaatttcagtattagaacgtgaagaacctcaatataaagggttttaagtagactggaggaaacgactatgtctcacctgccggaatggacacttgtcattcttcgctctgtattcatattaattattttattcgctattacgaaatggttagggaaaagacaaatctctcagctttccttttttgaatacatagccggaatgacgattggtgacatcgctgcccaagtatctacagggctcgattcaaaattttttcacggcgtctttgcgatactcattttcgctgtggtaccttttttaacaggaatcctctctttaaagaacaaaacagctcgggacttctttgaagggaaatctaccgtattaataaaagacggaaagatactcgaagataacttaaagaaagaaaaatatacgagtgacgaattactggaacttctccgtggaaaaagtgcgttcagcgtagctgaagtcgaatttgctgtcttagaaccgagcggagaattaaatgtattattaaagaaagattcccagccacttacagcaaaagacatcggtttaaaagtaccaaacgagaaagaaccacaaactgttattatggatggaaatgtactagatgaacctctttcagcaagcggacataaccgcgcttggctacattcagaattagaaaaactcggtgttgttattgaaaatgtcttcctcggtcaagtggattcatacggacaacttactatcgacatttacaatgacaaactccaaatgccttctcctcaaaacaaacctttattattagcatctttaaaaaaatgtcatgctgatcttgaactattttccttagaaacaaagtcgaaatcagcaagtgaaatgtatagtaaaaacgcgaaacaaatcgaaaagattttaaataaagtaacctatcttttaaaagactaattatcgaaagaacgcttcagttaaaaggcgttcttttcttttttctccagttttcataacgtttaaatttatgtaattcggttatgatgttgaagatacataagcagggaatttcgaaaacatagcgaatatttcatggtacaactacatatttttttgatttaaagtggtttcgtttgacctttattgaccataattgtattataagactaagaaagctttataaggaggaaataacagatgaatttaattcctacagtaattgaacaaacaaatcgtggagaacgcgcttacgatatttactctcgactattaaaagaccgcatcattatgcttggtagtgcaattgatgacaacgtagctaactcaatcgtttcccagcttttattcttggaatctcaagatccagaaaaagatattcacatctacatcaacagccctggtggttctatcacagcaggtatggcaatctatgatacaatgcagtttattaaaccacaagtatcaacaatctgtatcggtatggcagcatctatgggtgcattcttacttgcagcaggtgaaaaaggaaaacgttatgcacttccaaacagtgaagtaatgattcaccaaccacttggcggagcacaaggtcaagcgactgaaatcgaaatcgctgcaaaacgtatcctattcttacgtgaaaaactaaaccaaattcttgctgaccgcactggtcaaccacttgaagtactacaacgcgacacagaccgcgacaacttcatgacagcagaaaaagctttagaatacggtttaatcgataaaatctttacaaatcgttaataactaaaagcgaaagcggctcgtttagaatcgcaggtcgctggagctggatacaactaaaagtggaagcgccctataattgggcgcttcttttatatattgttccccgctcacataccccatccagtatctctctaaatatatcagcgatttttcaaatatatcgaccgcaactccgattatatcggcgattattttaatatatcgacgtttcgacataacttatcgacttaccgacaattctcgacaagcacgtaccccttaaatacccctcctcgctaattcgcacagacaacaaaaaagctatcgcatatacgcgatagctttttattgtacatatgcagctaatgcttctaaagcctcttctgcatctgaaccttctgttgtaattgttatcatgcttccagttccaattgctaagctcataatccccattatgctctttgcatttactgtctttccatctttctcgatgaagatatctgcatgaaagcgatttgcctcttgtacaaacaacgcagccggacgtgcttgtaaaccgttttttaatgaaacttgaactcttttttgaaccacagctccatttcccctttaacctcttatttttttgctaccgtttcccccgcgcgtaatttctctgcaatttcatcgattttacgcaaacgatgattaatacccgacttactaatcttccccccggataccatctcacctaactctttcaatgttacatcttgataatctcttcgtaattgtgcaatctcttgtagtttatccggcaatatatcaagaccaactgtctcatcaatgtagcgtatattttcaatctgccttagtgctgcaccaattgttttatttaaattagctgtttcgcagttcactaaacgatttacagaattacgcatatcacgtacgattcgaatatcttcaaatcttaaaagtgcattatgagcacctataatatttaaaaactctgtaattttttctgcttctttcaaatacgtaatgtacccttttcttctctccagcgtcttactatttaaatcaaatccgttcatcagttcacatatagcatcattatgttccttatataacgaaaagatttctaaatgataagatgatgtttctgggttatttactgaaccacctgctaaaaatgctccgcgtaaatacgatcgtttacaacacttcttctcaatcaattcttgtgatatatttcgaataaatgaaaagtcatctcgaacaatatgaagatcagctaatatttcgcgagacttctcaacaagccgcacaatatatacattatttttcttcaatcgcatttttttacgaacaagtaattctaccgtcacgtcatatccttttttcaaaagcgtataaatccttcttgcaattgccgcattttccgtttgaatatcgatagatagacgacggtttgaaaaagaaagcgacccgttcattcgaagtagcgctgataattctgctttctcacagcattccttcatctcaagattcgtcaactctttctttgtttctgatgcaaatgacacagtcaacacctccttatacgattattgcggaacaaaattcttgtcctatatgaatgaggagcgctacctcaaacgaggcaacgcatatttataacaatgaatataaaatcgaagctaactttaacgtatcatgccttacaacatgatcatcatacttcgctaatccctcttgaataacatcaatattattttcaacaaaacgttcttcatccactacaactggtgtagacatttcttcatcatataacttacgtaattcacaaggaatctcacggttatttacaattgcagtattgataaatggttgccctaaatgatcgtgtaacgcctgcacatgatcaaaagcagtatatcccatcgtttcacccgcttgtgtcataacgttacatacatataccttcttcgcctttgcagcaagaactgcgtctccaattttgttaacaactaaattgggtaatatactcgtatacaaacttcctgggccgaaaacaagtaaatcagctcgtttaatctcagccaacgtttcatgcaatggctctacatcttctggagttaaaaagacgcgattaatcttctttccgtaataaggaatctttgattcacctgttacaatttctccatcttcaagttccgcatgaagtaccgcactttgattcgctgctggtaatacacgtcctctgacatttaatactttacttgtttccgtaattgcatggaaaaagtctcctgtaatcgaggtcatacctgccaataatagatttcctaacgcatgacctttcagtccgtctcctgttgtgaaacggtgctgaaataaagcttccaccagtggctctacatccgataacgcaacaagtacgttacggatgtcacctggaggtggaatttctaactcatcacgtaatcgacccgaactgccaccatcatcagcgattgtaacaactgctgtaatatcaacaggatattgctttaatcctcttaataaaactgagagtccagttccgcctcccatgatgacaattttaggttttctctcttttttcatcccttaatggccctttctcttctccacatcacgatgagatacatgaacactatactctggtttcaaatgtttcccaaggtattctgtaagcgtaacagaacgatgctgtccacctgtacatccaattgcaattacaagttgacttttgccttctcttttataatgaggcagcatgaaagtaatcagatccgtcaacttctctaaaaacttatgtgtctcattaaatttcagtacatacgaagaaacttcttcatctagtcctgttaatggcttcatgtgtggaatgtaatatggatttggtaaaaaacgaacatcaaatactaaatctgcatcaattggaataccgtacttaaatccaaatgacataacatttacacgaaatgcttgctcagtttctgttgagaacaagtgaacaattttttcacgtaattctttcggttttaaatccgatgtatcaagcacaatattcgctcgtgccttcatatctgttaataaattgcgctctgcttcgattccctttaacggcaaaccagttggtgcaagtggatgcgaacgtctcgtttctttataacgagttacaagcgtactatctttcgcatctaaaaataaaatatgaggaataatccatgtacgttctgataaatcatcaagtgctccccataaatgttcgaaaaactctcggccacgtaaatcaataccaagtgccactttattcattttcccttttgaatccgccataagctcaataaactttggcaataacatcggtggtaaattatctacacaaaaatatcctaaatcttcaaaactttgtaaagctactgtttttccagctccagacatccctgtaataattaccatttttatatcattattctctgtcatcgtatcctctccttgacggtttaactcggatctaatcgatatgaaagcaactcaaaatctggggtatatacaaatgtaccgtagattatgccatttcctttaattaaataatcaataatgtgataatctcctggcgccattgctaaatcatcaattttatcaaatgtatgccaaccaatgatgccttcttcgctctctagtttgttttctcctgcaaaatctgtcgctaaaaaggagaacatcatccattcagaaacaactttatcaccttcttggatgacaaaggtgaagaccccctttaacgctgggtttttcaaataaatacctgtttcttcgcgatattcgcgaacaacggaatctcttacagtctcaccacgctccattttcccgcctggtgcaacccaccaattccggcgaggtttttggagtaagagtacttcattatctctaattaacacacagtttgtcactctttgcatgtttcttcacctcagctacttgcagtaaaattcctcactgcatacttctttcattatactatcaaaaacagtttgctacaacgaaggagccagtcctctttcgctaagcatatgctactcagcaattttaaaaaagctttctataacaagcaatgtaaatgcttagacttttaatgaatagcatgaaaaatccccttaacgctttttatcgccaaggggattaaagtacttatttcttaccgaaataagtaacaatcgcaaatcctaaaataaaggtaatgattgaacttataattgaaaatccaccagtcggaatcccagggaatacaattacaatcgaaccgattacaagtccaataattgccgcaaatgtcatacttttataacgatctaataaaaaactaatgcctttactacttacaacaaatccaaccataacaccagcaccgataaccacgattaaaggtaagttaagtgtagttaaagcgttaattgctgttggatacacaccaataattaataaaataaacgatccactaatcccaggaagcagcattgccatactagccatccatcctgcgaaaaataaaccaattgcatttacaattgttaaagtcgtaattggatctgctgccttatctggtttaaagaaagctgtaatcgcaacaagaattgctgcaactattaataaaacgatgtgcttacctttaaacgacgactttgcatcagcttccctcattaacatcggtaatatactaataattaaaccgaggaagaaaaattgagtcggttcataatgatttgcaagtaaatatttaataacgtgacttaacgttaaaaatgccgctgccacaccagctgcaaggggaattaaaaatcctaaatgttttttccattcacgactaaagaatccactaattgccgcaagcaattgttcataaatccctaacacaacagcgattgtaccgccgctcacaccaggaattaaatcactaacgcccatacaaaatccacgatatatattacgccattccatactgaataaattcctcatttcttatagtgattttttccgtaaagtccagtatatcaataagaaagcttataatccttatattttttgacaaaactttgacattttcacacaaaaaaagaagaaagctcctgtcggtagctttcttctcacaaggtatattatcccttatttttctgatacagtttttaattcctctaataattcttctacgtaatgttgtgcactttgcgctgcaatactaccgtcacctgttgcagttacaatttgacgaagcattttttcacgaacatcaccagctgcgaaaataccagggattttcgtttccatacgctcgttcgtttcaaggtaaccattttcatttgtaatacctagttcaacaaatggttttgataaaggtaacataccgatgtatacaaatacgccgtcagttttgacttctttctcttctccactatttacgtccacaagtgttacacttcctactttaccacttgcttcgttgatttcttttatagtgtgattccaaatgaaatctactttttcgttttggaaagcacggtcttgtaaaattttctgtgcacgaagcgtgtcacgacggtgaacgatcgttacttttgatgcgaagcgtgttaagaacacaccctcttcaacagcagaatctccgccaccaattacgataagctcttttcctttaaagaatgctccgtcacatactgcacaatatgatacaccgcggccgccaagttctgtttcacccggtacaccaatttttttatactctgcaccgcttgcaacgataattgcacgtgctttatattcttttttaccagcaataattgttttgtattctttaccatcgatgacttttttcacatcaccgtatgcatattcagcaccaaatttcttcgcatgctcaaacattttatttgataaatctggtcctaaaatagactcataacctgggtagttttctacatcttccgtgtttgccatttggccacctggaatacctcgctcaagcattaatgtgcttaaatttgcacgagatgtatatactgcagctgtcataccagctggtcctgcaccaataataacgacatcataaattttttcttctgacacactattcactcctatccattcttacacaattaagttaccctcattatactgttagcatcatttttttcccaatgatttgcttatcttatgtgtgcgtacgcttaacagcttgcacatactttcggacagtcgctacagatacattatatacatctccaagctccgactgtgtcattttatttccttgttcgccgcgtacaatgtattcaatcgcagctgaccagccgtacacatttgtaaatatgtctccagatgtatataaacgtatgaacgtacaaaaccaaaagtgtaaacactcttcgattaattcatcatcttttttcgtataattgtataatgcatccgcaattctcgcgcactgctcaaattgctgtaaatcagctggaatactcttatgactattaagtaaaaagaagtactttgcaagttgcgatacgatgggaacaccgttcttcgcttgcgttatatcaaagaagaatccaaccttctccggcgttgacaattcattcattaaatataaagctagcatttgttcttctagcgtcgcactttgctgaaatgattttcgtaattcttcaaataacacattttgcccttcatctgctaaattcagcgcattccacggttcttttccctttttatcaggatgtaattccacgacatattgccacattttttcagctagttgctggtctttcaccatatacgcagaatatgcaaaccaataataaaaactaacgtctccctcatatccttgacgctttaatagtttgaaccacttatatgcatgctcgaaataaccaattgttgcgagtgtagttcccagtttcaaacgatgttcaaatgaaatcggatataccgaaactagctgtcccgctaatgcctctacttgtttatgctctccaattgaatatagaaaaataagcgtattacaaagcgcatgtatattgccaggatttttctctaaaatcatttctgttaacttcagtgctttgtctacattaccagattgaaaatgtgcaatggctaaattattatgacctgaccaaaattccggataatctttcgtaacaatttctaatgtagcaattgcttcttccaattgtccattacgaatatagcgattcgcttcttcctgcataacaattaaatcatcttcatcttcaatctcttccgcacccattgcttcttcttccataatctcaagaagttctaacgtatcttctacgaattccttctcttttgcaacttctaaataacgatctgcatatttcttcgcctgttgaaataaccccatatatgcataattatttgcaataaaataatagcactgttcaagttctggattagatctaactaactttaagaagatttgattcgattcttgatattcaccagcctcagataatactgatgctaattgacataaaataaacggctccttctcactttgtgccgctcttcgaaaatatttaattgcatcttgcaatttttgtcctttgtaagctctcatcccttttttataaaagaagtccgctaattgattaaaagagataacttgtccgttctccttatatatcctttgatttttccccatatatcctccagttttttgttttcttcgttcacacattcttctatctataagtataaacgattccgtaaaaaacaaaacagtatattatactcaattatttcctttttattcataaaaaaagaggagaaatgttacattttcaccatgaaccttctcttgcggtcatttgctctttcgtataaataatacgcattggatttccacctacgaaagcaccgctcggtacatctctatgaacaagtgtgccagctgagacagtcgcaccgtctccaatgttcacacctggtaatattgttacattcgctccaatcattacttcatttccaatgacgatttcgccaagtcgatattcacgaattaaatattcatgtgctaaaagcgttgtgttatagccaataatcgaattctctcccacagttatcttttctgggaacataatatccggcattaccataagcgcaaatgatgttttctttcctactttcatccgtaaaaaagtgcggtacaaccaattttttacggataaaaatggcgtgtaacgcgcaatttggataataataaagtttttcattaccttccaaaaagacactgttttatacacattccataacgaattttctcctgaaacaggatagcgcgttgtccgtcgcacttagctcgctcctctactaacttacttgaacctttatgaacggttcatgttagacaaaatcggtagcaaatcactcattttatctagcataaagtccggcttgtaagcctctaaatacgctctacctttcaacgtccatgaaaccgcagctgttttcgtccccgcattttgaccaccgacaatatcatgatgattatccccaaccatcaatgcctcttctggttttgcatctaataattcaagcgctttttgaagtggctccggatgtggtttcacatgctctacatcatcaattgtcacgacaacatcaaaaaattcatcaagctttgacaactgtaatcccatctcaacggtttgtctcgctttcgttgtaacaataccaactttataaccttgcttcttcaactctcgaactgtttcatatacagtttcatattcttctactaattcatcatgatgatcatggttaaatttccgatagctagtaatcatctcttcaaccttactttcatcaatcttgctgaaagtatcatgcaaagatggaccgataaatggcaacacatcttcacgcttatattgatttggataatatgtatttaaagtatgtaaaaacgaagaaataataagttcatttgtattaattaaagttccatctaaatcaaataacacggtatttattctcatcgccttagtcctttcgccttcctgaatatgaaagaagcagcatcttataataagatgctacttgtctctaattttctaaatatcttttatcagcttgccccatttttcgtctcacaataatgaaaataatagaaataacaacaagtccaattgacattacttgtgcaatacgaagtggtcctagcattaaactatctgtacgtaagccttctacgaagaagcgtcctactgaataccaaattaaatatgtgaagaataactccccgcgacgtaaattcacttttcttaatgcaagtagtaaaattacgcctgcaaaattccataatgattcatataaaaacgtcggatgatagtacacaccctcaatatacatttgattaataatgaaatccggtaaatgaagaccttctaaaaactgtctcgttacttcatcaccatgcgcctcttggttcataaagtttccccatcggccaattgcttgtcctagtaaaatacttggtgcagcaatatcagccagcttccagaaggaaaccccgcgtcgtttcgcaaaaagaacacctgtaataacagccccgattaaaccaccgtgaatcgccaaaccaccttgacgaatattaataatttgactcggattttgtgcgtaatattcccattcaaaaataacatagtacattctcgcaaaaagaatagcgatcggtactgcaattaatacaaggtcaacaaatgtatcttttggaatacctagcctttctccctcgcgagttgccagccaaagacctaatagtacacctgtaccgataataatcccgtaccaatacacaggaaacggcccaagttggatagctacacggtcaagctgtggtacagaagctaacagcatatgtatatgacctccctctccaaagtttactcctgatttcctaactcaattgcactcattaatcgttcagagaactgctgtgctgcattgactcccatacgtttcaaacggaagttcatcgctgctacttcaataataacagccaagtttcgaccaggacgaactggaagtgtaatcttcgtaagttctgtatcaataattttcatcttctcttcatcaagacctaagcgatcgtaatttttcttttgatcccaaatttcaagattaataacaagtgtaatacgcttataatttcgtactgcccctgcaccgaataacgtcataacgttaataatacctagaccacgaatttctaataaatgctcgattaaatctggtgaacttccgactaacatgtcttcatcttcttgacgaatttccacactatcatccgcaacaagacggtgaccacgctttacaagctcaagagctgtctcacttttaccaacaccactttgacctgtaattaaaacaccaacgccgtaaatatctactaacacaccatgcacagctgttgttggtgctaacttaccttctaaatagtttgttaaacgacttgataatctcgttgtcgtttgagaagaacgtaataaaggcatacctgattcacgtgatgcttgtaataactcatctggtacatcttgattacgagttacaataatacatggcgtctcctcagtacaaagcgctttcattctctcttgtttttgctctgacgttaacgtgtcaaagaaagtaagctccgttttaccaagaagctgcacacgatctgctggatagtatgtaaaaaatcctgccatttcaattccaggtcgtgataaatcacttgtatcaatcggacgatgaatgccttcttcaccactgattaactccaattgaaattgttcaattaaatcttttgttcttactttcggcatatgtataaacctccactccgctgcgggttcagtctcgtttgatgtaaaattccattctatcggatattgtaccatttttttctgaaaacaagaaatacggtttctaataaatagaaaaaaacatttcatacgaataatgaaatgtttttctttttgtcactttctctttttttcatatagaggctcaacaattgccttttcaattatcatattaaaaattgaaatacaaattgccgcaacaatcgctacaccaaatcctgatatattaaaagcatctcctaataatgaatctgctatttttaacgtaatcgcattaataacaattaagaagaagccgaaagttacaacagtaattggtagcgtaattaaaattaaaaatggctttacgaacacatttaaaaccgccaatataatactcgcaataattgcagtttgtatatttgctacgtaaaatgcatctggtgcaatcccttttaaaagtcccgatacagcgattaacacaacgctatttacaagaagtgatacaatccatctcatttcgttacacatccttttaaacatatatatttcatcatacgctaatagataagaaacgcaagtatgatacgaacacttatatcaacttattctatctttcatgcttgtatacctactaacatttcttagtaaaataagggccgcaccatctatgttcatgagtttttacaaaagtccaagtgaactccttatctacaatatagatatcacccttatacatatcgtccctctcacacaatatatcatccatatgtaacaaactcgcatcctttattaacagtacctcatcacagtgttggtagaaaatgtagcaatcctttttcacttcattatgaaacgcgttctttgcttctttaccctctaaacgcttctttttctcataactaaatatgtgccaaagatacccacatccatacttatctccataaagaaaaatgtcttctttttcttcatcacttaaatgatttgcaaagtgatcctcccagcgctttcgaaaatatacaccccaattttgaaactctcttaccttcatatttttcttccttaacacctctaaaaacttcatcttctccccctatacaataaaaaccgagcgtcatttccacccggttttcatcaataaacttattgcgataattctacttcttttattttctctttcattcttgctttatcacgatttaaaatctcttttaaatatttacctgtgtacgagcgctcttctttcactacttgctctggcgttccggaagcaacgatttgtccacctttatctccaccctctggtccaaggtcaacgatataatcagccgttttaattacatctaaattatgttcaattacaagtaccgtctcaccgctctcaacaagacgttgcaacacttctagaagacgtgcaatatcatgcgcatgcaaaccagtcgttggttcatctaaaatgtataacgtacgtcctgtagaacgacggtgtaattcagaagctaatttcacacgctgtgcttccccaccagataatgttgttgctggttgacctaatttcatataaccaagcccaacgtctacaagcgtttgaagtttacgcttaatttttgggatattagcgaagaactctactccatcttcaattgtcatccctaacacttcagaaatattcttatctttatatttcacttctaacgtttcacggttgtaacgtttaccatgacaaacttcacacggaacatacacatctggtaggaaatgcatttcgattttaataattccatcaccacggcacgcttcacaacggccaccttttacgttaaagctgaaacgtcctttttgatatccgcgcactttcgcttcattcgtttgtgcaaacacatcacgaatatcatcgaatacacctgtatacgtcgctggattagaacgtggtgtacgaccgattggtgattgatcaatatcaattactttatctaaatgttcaagacctttaatctctttatgagtacctggcttcgctttcgctttatataacttttgagctagcgatttatatagtacttcattaatcatcgtacttttaccagaaccagatacccctgttaccgctacaaacgtaccaagcgggaatgacattttcgcattctttaagttattctcttttgcgccgacaatctctactttacgtccatcacctttacgtctttcaagtggaactggaataaactctttaccgcttaaatacttccctgttaatgaattatcatcttgcatcacttcagccggcgtccctgctgaaacgacctgtccaccgtgaatacctgcaccaggccctatatcaagtaaatagtcagcagccatcatcgtatcttcatcatgttcaacaacaattaacgtattacctaaatcgcgcatttcttgcaatgtacgaataagacgatcgttatcacgctggtgtaaaccaattgaaggttcatcaagaatataaagtacgccagttagacgagaaccaatttgcgtcgctaaacgaatacgctgcgcctcaccacctgataaagttcctgcggcacgacttaacgttaaataatctaaaccaacgttcactaagaacccaacgcgctcctgaatttctcttaaaattaaatgagctattttttgttgcttctccgttagctctacattcgagaagaattcttgtacttcttgaactgaatacttcgttacgtcagcaatcgttttattgccaacaaatacagctaagctctcaggctttaagcgtccacctttacacttcggacaagcttgttctgccatatacttttccatttgctcacgaatgtaatcggagctcgtttcacgataacgacgttcaatgtttggaataacaccttcaaataaaatctcattttcctttacttgaccaaattcatttacatagcggaaataaaccttctcttccccgcttccgtacaacactttatcaaataaatctttcggtatatttttcacaggcacatccatatcaacgccgtagtgattacatacagattgtaaaagttgcgggtaatattgtgaacttgtcggttcccaaggtgcaattgcatgttcatttaatgataaatcccagttcgggataacaagctctaaatctacctctagctttgaaccaagtccatcacaagaaggacatgctccgaacggactgttgaatgagaacatacgcggctctaattctccgattgaaaaaccacaatgcggacaagcatgatgttcactaaatagaagttcctcttctcccattacatcaattaacactcggcctccgccaagctttaatgcactttcaagtgaatcagcaagacggcttgcgattccttcttttacaacaatacggtcaattacaacttcaatggaatgcttcttatttttatctaacgtaatatcttcagatacatcaagcatttcaccatcaacacgtacacgaacatatccttgcttcttaatatcttcaagtactttcacatgtgcacctttacgcccagacacgataggagctaacacttgtaatttcgtacgttcaggatattcaagaacacggtctaccatctgctctactgtttgtgatgtaatttcaatcccatgatttggacaaattggcgtaccaattcgcgcaaataataaacgtaaataatcataaatctccgttaccgttccgacagttgaacgtggattacgactcgtcgttttttgatcgattgaaatcgctggtgacaatccttcaatcgtgtcaacatccggcttatccatttgtcctaaaaactggcgcgcatacgcagataatgattctacgtatctgcgctgcccttctgcataaatcgtatcaaatgctaatgatgatttccccgaaccagacaatcccgttacaacgacaagctgatttctcggaatggttacatcaatattttttaagttatgtgctctagcaccttttacaacgataaaatccttgctcttactcacttttttcacccttccgcttttaattctaatagtaaatctcttagttcagctgcacgctcgaagtctaacgcttttgctgcttctttcatctctgcttccatcttcgcaattgtcttttcgcgctcttttttcgtcattttcttagaaggagttgcttcgtatgtttctgcctcttcagcagctgtcgttgcacggataacatcacgaacgcctttttgaatcgttttcggcgtaataccatgctcttcattgtaagcttcttgtatactacgacgacgcttcgtttcttcaatcgcaattcccatagatttcgttatacgatctgcatacataataacgcggccgttttcattacgcgcggcacgaccaattgtttgaattaatgaacgttctgaacgcaaaaatccttccttatcagcatctaaaatagcgacaagtgatacttccggaatatctaatccttctcgcaataagttaatgccgacaagtacatcaaatttaccgaggcgaagatcacggataatttcaatacgttctaacgttttaatttcagagtgaagatagttaactttaattcctacatcttttaagtaatccgttaaatcctctgacattttcttcgttaaagtcgtaattaatacacgttcattttttgcaatacgatcttgaatctctcctaataaatcgtcaatttgcccttcaattggtcgtatatcaattggtggatctaaaagccctgttggacgaataatttgttctattacttctggtgactgctctaactcgtacggtcctggcgttgctgaaacgtaaataacttgattcgttttctcctcaaactcatcaaacatgagcggtctattatctaaagctgatggcagacggaatccatgatccacaagcacttgtttacgtgcttggtcaccgttatacatcgctcttacttgtggtactgatacgtgcgactcatccataacgattaagaaatctttcggaaaatagtctaataacgtatacggcgttgcccccgctggacgaagtgttaaatgacgggagtagttttcaatacctgaacaaaagcccatctcgcgcatcatttctaaatcataacgtgtacgttgctctatacgctgcgcttctaacaacttaccgttatcatttaactcctttaaacgttcttctaattctttttcgatattttcaatagcgaccttcattttctcttcacgtgtaacgaagtgagatgctgggaagattgctacatgatcacgttctgctaatacttcacctgttaacgcatttacttcacgaatacgatcgatttcatcaccgaaaaactcaattcgaatacaatgctcatcaagtgatgctgggaagatttcaactacatctccgcgtacacggaatgtaccacgcttgaaatcaatatcattacgtccatactgtacatcaacaagttcacgaagcaattgattacggtctttttccataccaactcgaagcgaaacaactagctcgcggtattcttctggagaacctaagccatatatacacgaaacactcgcaacgataattacatcgtcccgttcaaataatgcagacgttgccgagtgacgcaatttatcaatttcatcattaatctgcgcatctttttcaataaacgtatctgtttgtggtacatacgcttctggctgataataatcgtagtaactaacaaaatattcaactgcattattcgggaaaaagtctttcaactcactatataactgccctgctaacgttttattatgagccataacaagtgttggcttttgcacttctttaatgacatttgaaatcgtaaatgtcttacccgttcctgtcgctccaagcaacacttgctttttctttccactattaattccctctacaagcttctctatagctaccggctgatcaccttgcggggaatacgctgagacaatttcaaattgacgttccaagaaaatccgacctcctcataaaaatctgtattattattttaccacgaatacctataaaaaacctaaaaaaacgaacagatattcggtaaagttttcgacaatatacacatagaaaaaggaaggagtaaatacttccttcctctactaattctattttttaggtacatatactaagtcatatccattgcgcccagcttcattcatacaatctattaaccgataagtacttcctgattcgcgctgctctttaacaatacctttacaactatctttatgtaaccctttatccttcccagcaaatttgtcttttctattatctgacacataaaatatatcgttcccactatactctaacgtttgaaaaatcgggtccccttcaagggtatactgtacaattcttattttatcaacttccctttgctcgacattcaaaacgaacttttcaaatttatctagattgagaattcctgctccctttacaatgacatcattcttcttatcaattgtagtgctagatggtgaacatgctactaaactaaagagaaatagacttataaaactggttctttttcctattgtcatcctctcctataaaaattatttgtataccagaaaagctactttcaattatgaaagtagcttttcttttcctttctccttcttcggaaaaatcacatatgaaaatgaaatcgctgtatcaactaaaaatataatcgcccacacttgactcacgcgacttgcagctttatttaaaacgattcccgattctaaccaattaccccattgttcaaatggaataaatccatacgcgaagaaaaaaaatatgtgcacaccaacgaataaaacaagatgtaatacccaattttttatttcctgctttgcataggccatacctgttaattctacctgttcttcaataataggcgccggttcattacgccatttcgcaactgatttttgtacaaatatatcaagcttctttaaatcctttttcccgtagaaaactgcatataataaaatgattacagtaataatctgaaagttagagaactttcctgtttgataatagtccactacccctaaagttaaaataaatacttcatttacgaggagtacaatccccataataaaactcgcccttttcaaacggaatccgtagcgaagtaaaaagaaaccgatagctgataaccaaaatacaatttctgccccaattaaaaaataccaacgatattctgcgagtatactcatttatccttctccctttcatcataaatacgaaaagcctcatccatatatgctaaaagttcttcttcaattggatacatgctcattttctgtgaatcttccttcgattttctaacttcccataacttatctaaaaacgcttcgtcaccattagccatttctaaacatttctgcattaatttcttcgttgcctcttgtacttcatcacttgcgacttctttaccgtctttcataaaagtacgtaattgctttaataaatctacccattctaaaacattcggatcttcctcactcatatttggcaaattctgaagcaatttttgttcttcctttgaaaatacttcattttgaaatatttcacgtatacgaggggactgttttgaaagctgaataagttcaaacataactttccaatcaagttctccctctacatctaccgaataaacaactgcttgtaaaacacgctccattcgattaaatttcttttgttcttcctgtacaaaccgaagttgtttttcaagcgaattttttaaatccagctcaccttttactaacatattcgcagcttcttttaatgaaaatcccatttctttcaaaaataaaatttgttgcaaacgaataacgtcattttcactatataaccgatgtccaccctctgtttttccgctcggctttaataaatctatttgatcataataacgtagtgtacgtactgtaacccctgtttctttcgtcaattcttgtattgaaatcactaccatcacctcttccctctcattataaaagatgacgttacgtaactttcaagcgttttgtaaaaaaaatacaaaaagctgtttatacaaagtgtataaacagcttttatggaaataaccccttttgtatggcgcgcccacaaaataaaataagtgctccaacgacaacactcgttgccgttttatgataatgggctaataataataaataatacgataaacctacagtaccaatcataatacaaatgctcggcactggattacgagaaaagttttgcattccccaaagaagcgaaaatatagctgtagcgacacataacaccggtaatcccatcccagttcccctttttctatctattattccttgttgctaacacgctcgttgatgcgatactaattaataaatcaaaaccaatccttatatatttaaacgtttactctaattgaaatctctcaagcttatcatttattttctttctccttactccagcgtaaatatttcctccaccttcactccaaaatacttggcgatttttaaagataactctagactcggattgtaatgatggttttcaatcgccactatcgtctgccgcgtcacttgcatcgcctttgccatttcaacttgcgttatatgattttgctttcttaactcttttattttatttttcacacccataggctccaccttcaaaagtaaagatatctttacttaaattataaatattttccagttataagtaaagatacctttacaaattttagaaaaacgtttcactgaacacctactctaataaagtacaagagtaattcaatttatatcagcgcaacttaaattatatcggcgatttcccaaatatatcagcgcaactccatttatatcggcgattttttaaatatatcgacttaccgacaaatatcgacatccgtagcgctactataatcataagaaaaagctgtccccaaataccttcgggaacagctttctcctctactacataaatcctagcgcatatacaagaacgtatccaagaaccgataagcaaaccgagccaatcagccccgccacgaacgctttgcttcctaacttacggaacgttttaaactctacatttaaaccaagtcctgccatcgccattgcgattagcatataagcaatgacaacaatgtatcccgcaactacttctggaataatcccgagcgaatgcactgcactcatcgctaaaaatccgaaaatgaaccatggaattggaaggtcgcgccacgatcttttttccttgcttccttcactctttccaaaccataatccaattaaaattgctactggtacgagcattgcaacgcgcgttagcttcacgataactgcgatgtctatagccgtacttcctcctggcgccgcggctgcgataacatgagcaatttcatgcagcgtggcccctgagaatacaccgtaaccatatggagataggccaagcactggatataacaacgtataaataagcgtaaatatcgtacctaaaatagcaataattgcagccccaactgccgtttcatcatcttttgctttcacttgcggcgcaattgccacgaccgctgccgccccgcaaattgctgtaccacatgcggttaaaatcccaagtttcttttctaccttaaatactttcgttagtccatatacaacgaaaatcgtaaatgtaataacaaccgctgcgatgaccaatactttcggccctgccttcgcaatatcaacaagatttaatcgcattccaagtaagatgattccaaagcgcagcaaattcttactcgcaaagttcgtccctgcaatcgcatcttgagggactccaattgcagcgcgccaaaccatcccaattagaatagcaattactaattgtcccataatatttaaaaatggaagctctgctaaatatttcgcggcaattgcgattaataatgtaatcccaattccttgcgaaaatccaaaacgcttcttcttttgtataacaagtgtttgttccattttgaaccactccaataatcgtattggaacatgcatgttctttctacttacattataagagagtttctataataagtttaataccaataccaaatctctatcattagaaatacttatgataagataatagaaaaagaaaggagcccattatatgaacgtagacattttaaaaatttttgttactgtcgttgaacagaaacacttctcccgtgcagcagaattattaaacctttcacagcctggagtaagtatgcatatacgcaacttagaaaacgaatttggcactacacttattcaacgctccccgaagcacgtccaagttactgaagctggaaacatattatatatacatgcaaagcaaatgctctctctttacgaagatgctaaacaagaaattaatgaactacataacgttgtaacaggaacacttcgcattggtgctagttttacaattggcgaatacttacttccaaaaatactggctaactatgcgaatgaaaatccacacgtcgaagttcatactttcatctcaaatacagaagacgttttgcaaagccttcgctctaatcaaattgatatcggcctagtggaaggacaagtcgtatacgccgacgtagatgttgaaacatttatgcaagatgaaatgaagctcgtcgtcccgccaaatcatccattactccgcacaaatgaaataaatgaaagtacactccaagatcaagtatgggtattaagagaaagtggttctggtacacgcgcttatagtgaccgctttattcatcaacaccatttaaaaatgaaacgattctttacattcagtagtatccaaagcgtaaaggaagctgttagtgccgggcttggcatcgctatcctttctgattggactgtacggaaagagctattagcaaaagaactattccacgtcgaagttccaaatgaacaactaatccgtccgttctccatcgtgcgcggtaaatatttcattccatctaaagccattcaagtgttcttaaatcatgtagattcttttgcgaaaaaacagagttgaccttcacattagtgtgaaggtttacaatacatgtaaaaggagtgaaatacattgcgaattggagaattatcaaaagaaactggcgttagtgaaagatcactaagacattacgaagaaaagggcttactcccttctaagcgccttgcgaatggttaccgtgattttgatgaaagtgccatcgaaaaagtggagcttattcaaatgtacttacaaattggcttaaatttagaagagacggcaaggatgctgcgctgccttgaaattgaaccgcacctgtacgacaatccgtgcagcagtatccttacgctttacgaagataaactcaatgaagtaacaaagcaaatctcattgctttccaacatccaaacgaatttgcaaaaacacgtttcactcctaaaacatgcaaaagaaaagggatgattacatgtttgttatacatggcagttcaagacaaaacggaaatacagaagctttaacacatatgatgatagaggacattgaaacagaacaaatttatttgcgtgatcatactgtctatcctattacagaccaacgtcatgatgcagaaggattccaatccgtaaatgatgactatgagcagttaacgaaacgcatgctagaacacgacacgattatctttgctacaccattatattggtacggaatgagtggacatatgaaaaattttgttgatcgctggtcacaaagcttgcgcgatacatcccttcatttcaaagaaaaaatgaaaggcaaaaaaatgtatgttgtcatcgttggcggggacaacccaaaggtaaaagcattaccgcttattgctcaattccaatatatctttgattttgttggctcttcatttgaaggttatgttatcgggaatgcgaatggactggatgaaattaaaaacgatgctgaggcgctggcaaaagcacaattgtataatgatacattcaaaaatagcgaacagaaataagtttgacaaacccttttgtatgcgcatacaataaaagtaatattatgaaaggaaggtactttgaccaatgaagttctaattctcttatttatttcatccatcacaaatagtgaacaaaaatgatgaaaactagcaggggattagtctgtccatttgtcgatactttctttcgaaacgatcatgtaaaaaatcgtttatttatgtacgatttttttacatacaagggcgacgtttatcctctctagtgaaactagggaggtttttttatgactattttattcgcaagtaatattgaaaagagctttggtgatcgcacactatttacattaccatcactggaaattcaagcacaggatcgcataggaattgtcggagtcaacggagctggtaaatctacgttattacaaatattaagtaaagaaatagaagctgacagaggcatagtaactcatcatagttctatcagcatcattcctcagcttagcgaagaactaccggaaactgcttcttctcttgcaaaaggaaaatggagtatttcaaacgttaccgacgcaatgagcggcggtgaacgaatgcggctaaagatcgcccatgctctcgaacaaaatgcaggcattttattcgctgatgaaccaacaagccacttagatatggtcggtacagagcaattagaaaaggcactttcgtcttataaaggagcacttgttttaatatcgcatgatcgtgaatttctagataatatatgtaccaaaattattgaaattgaagacggtactattcaagagtacaaagggaattattcaaactatcgaaaacaaaaagaacgtgaacgaatacaaaaacaagcagaatatgagcaatatgtacaagaaaaaaatcgtttagaacagtccattctacaaagaaagcaacgtgcttctaacatgacaaaaatcccaacgcggttcagttcatctgaatctagactttataggttaagtggggctcatggccaagaacaggttagcaaagcagcgaaggcattagagacacgtctcgaaaaactagaaaagaaggaaaagccaaaggatctttctcaagctcaatttgacgtgcaataccatactcccattcatagtaaggtggcagtacaattcaataaagcaacaaagaaaataggcgaccgcacactatttaaaaatatgaatggaactattgcccctggtgcaaagcttgccgttttaggggcaaatggaagcggcaaaaccactttgttcaacatgcttctcacaaacgagcgtggcatgcagctatcgaaaagttgtaaaattggatacttcgaacaaacattatctattttaaaaacagataaaaccattttagaaaatgttctagaagaaacaaactatacagaagcattcgttcgcacaatacttgcacgacttctattccgccgtgaggatgttcataaacctgtgcatgttctaagcgggggtgaacgaatgaaggttgcactcgcaaaagtatttttaggaaactataatatgcttctgctagatgaaccgacaaactatttagacttagcaacgcaagaagaattagaaaccatgttacaagaatatcctggcacaatacttttcattagccatgaccgtgcctttattcgctctgttgcagaccatattctacaagtagatgagagtgaaccaagaatcttccacggtaattacgagcaatacacaaaaagaaccaccggagcttctgtaaacgctactgagcaagaattgttacgattacaaacaaaattaacagaagtcatcggccggatttccattccaaatcatcacgatgacatcacatctctcgaacaagaatacgcaaaattattaactcaaattcaaaaatgtaaagaagcgctctaatgtcttccctatatatcgacggggccttccacatttcccaagaaatattgaaacttcgacatacaaagtaaaaagccgtgcatcagcacggctttttactttatatgcggacagcagtcccgctcaccgcaaccattaacataccttcgcgaactacttcgtaatccacgtcgataccaacaattgcatttgcatttttttgtcttgcgaaagttttcatctcttccattgcgatgtcgcgtgcttcttttaatttactttcataagcgccagcacgaccaccgacaacgtcacgaacagaagcgaaaaggtcacgaacgatattcgcacccataatcgcttctccattgacgatatcgatatactcaataatttcttttccttgaattgtagacgttgttgttacaatcatactttatagcctcccatatgagatttttacctacttatggtgcactaattcagtacaaattatatttacgaactaaactgagcttcgtataacctactgtatcctccgccttgctcaattaattcattatgtgaaccttgttctgcaatgccatctttatttacaacgacgatgcgatctgcatttttaatcgttgcaagtctgtgagcgataactagcgttgtgcgaccgacagctaattcagcaagcgatttttgaatcgcaagttctgtctctgtatctagtgcagaagttgcttcatccaatattaaaattggcgggtttttcaagaacatacgagcaatagctagacgctgcttttgtccacctgaaagtttcacgccgcgctcaccgataacagtatctaaaccttccggctgtgagtaaattaaatcttctaactgcgcacgttttactgcctgccaaatttcaggctctgatgcctttaaatttccgtaagcgatattttcacgaattgttcctgaaaataagaacacgtcttgctgcacaattccaatttgcttacgaagtgaagataatgtcatatctttcgtatcaatcccatcaatttgaattgatccagatgattgctcataaaaacgtggtaataggctacataacgtcgttttcccagctcctgatggtccaacgaacgcaaccgtttcacctgcatgtattttcaaactaatgtcatttaaaattggttctttattttcatatccgaacgtaatgttgttatattgaatatcaccatgtacatgtttaacttccattgcatctttagagtctacaatgtcaggctctgtttcaagaagctctacatatcttttaaaaccggcgattcccttcggatagctttcgattaccgcgttaattttttcaattgggcggaagaaaatattcgttaatagaacgaatccgataaatccaccgtacgttaattctccttgcagaacaaaccatgtaccgcatattaagacgaagagcgttacgagccgcatgagcatataactaatcgatgaatttaacgccataattttatacgccattaatttcgttgtacggaaacgagcgttgttgacagcaaattgctctttctcaaacttttcatttccgaatgcttgtacaacacgaattcccccaacattgttctcaatgcatgcattaaaatcagcaacgtctgagaataaacgtctaaatgtacctgtcatttttttattaaagtaaagtgctaaccataataggaatggaatgacgaagaacgttaataacgctaacttccagttgatcatcatcataaatgagaatgccccaactaaagtcattacggcgataaatagatcttctggtccatggtgagcaatttccccaatttccattaaatcgtttgtaaggcgtgaaattaaatgaccagttttattattatcaaaaaatctgaatgatagcttttgaatatgatcaaataatttctgcctcatatctgtttcaatgttaacaccaagcatatgtccccaatatgtaacgacatattgtaagcctgcatttaacatataaactgcgagtaaaccgaaacaagcccataaaataagcgtccagttttgccctggcaataacttatcaataaattgatttacgataagcgggaagccgagttctaataatcctgcgacaaccgcacaagaaaagtcgagtataaataaacctttatacggtttatagtacgagaaaaatttacgcagcatatcttacctccattttccaaaattaaaaagactccctaaatgataaccattatcaaataattattcaagttatccgtctatgaaactgaaaataagctttgcgatagttgtcgttttttgctggaaagtcgatatattcgaataatcgccgatatatttcgagttgcgctgatatattcggataatcgccgatataaatttcatttactaactacccttcccccaaaaaaacaaaaaaggtatcaccacaaggtgatacctctccttctattacatcgcttccgaatcccactcgtgctcctgctcaacgaatacaatacctaattcgtgatgcccaccaacatataatgcagtttgtgcaagacgaagctcaccatttgtatctaatacttctaatttacaaaatgctcctgtcgtcttcgtttgaagcgcatcataaaattcctcggcgctttttggaatgactccatttactttcgtaataatttctccaggcagtaattttagctctgctccaattgtatttggaattgtatctagtacaacgagcccatcattgcgtgcagcaaaatatgctggtcttgtttcatcggcaattttctcttgcatcgagattgtgaaacgcccaagcattgcgactcccatcgcgataattgcaagtacgtgccaccagtaacttgcgactcctaaaacgagcacaagtcctgctaatccataaacacgtcttcctgtaaataataaggcttccgtcggctcataacttttaatctttctcataaatccaattaaaaatggaacgaggaatagagaatatgtatttgaaccgattgaaacgacaggccaccatgaaataaactgcgttaccgcatcacccggtacaagaataaaaataggaacgatccataaacgctttgattcgtgtaaaccaatctttaatccacgcttccccttcctaatcctcggcgtcgaatatcctactgcgtttttagaaatcaataagccttctacaataagcataacgcctagtaaaataacaagggatacaatggtactctcttcaccttctcgaagctgtaaaaaggaaactggtagcttagaagataatagaacacatacaatcgcaatgctaaatgtataagccgccgataaatatcgatacatagccgttaatccaaatagtaacgtccaaattaaaatggcccataagctcgctttagaaacaacaagtccaagcccaatcgtaacaatagatactactaatccgtatccaatcccttcaaatagagaggttcgcagttcaaaccaaatatcataaactttaaaagaaaaatcttttcgttctcttaacatacgtaagtatccaacgaagatactacttattacaaatatatagacagcagggtgtaagaaaaaacgtccaactgcccgcattatttcaaaaatccacgcctccatgaactcattcaccaccatttatatcattctttctttttatattatcataactaaacaaacgtttgtttaacacaaaaaaatacaggcagcaaactgcctgtatttcttcttattttgccattaattttaatgctgactgtaattgtagatcattttctccagaacgaattttttcgataattttagtttgaatcgcttcagctgtctttttatcaagctgtcctgtcgcttccatctcatttgcattttggaatgctttcagagccgattctgtctctttactaaagtatccatcttcacgacctggtacataccctaagctcttaagcatttcttgagcatgttttacttgtacatcatttgaattgtatgaaagtgttttttcaatttgaattggtgtcgcatgataataatttggttgcttcacttctactgttggcgcgattccttttttatgaatccagttcccatccggtgttaaccatttaaacatcgttaatttaatgttgctgccgtctttaaatggaacagcttgctggacagtacctttaccaaatgtcttttcaccaattaaatcgtatccttctccttcttttagcgcacccgctaaaatctctgaagcagaagcacttccattatcaattaatactgaaattggatatggttttctctctttcagttccgtagagaatttcttcttctcaccatttcgctgctctacttgtagcatcggctttttattcgtcataatttcccctagtatatcttctacactatttaaatagccaccaggattaccacgtacgtcaataactaagccttttatatttttcttctctaactcttttaactgatccttaaattctttcgctgtattttcagcaaaagaagtgatttgcatataaccgatatcttttccactctcttgcttcacagaactaaatactgtaaagattggaatcttttcacgcttaattttaaatacgatcggatcagttactcccgcacgtttaatttcaattgcgacagtcgttccctttttaccacgaatttttaatactgcttcttcacgtgataagtctttcacactgtttccatctacagataaaatttggtcattcggtttaattcctatcttttctgctggtgaacctttaattggcgatacgataataagcttaccgtccgtcttgttcacctcagccccaatcccctctaattcgggatcaagcgattcactaaactgtttggctgtttctttatccatatacgtggaataagggtccttcagcgtagacaacataccttgtattgcaccttcaactaacttttcatctttcacgtcttccacataacgtgaatcaattagtgcatacgcctcattaatttttgccaaattcccttgcgcagtgctagcattcccactcgaaattgtttgcgttacttctgatgggttaaccccaaatacagacatgcctgcaaacattccgccagcaccaattaaaaatgcaacaaccattccaataattgcaactctacgtttcaatgcggaattcccctttccaaaacacacaggtggtgtagcaaaaggcatcacacagtgtgtgatgcctttacctatttctactatatgataagcttgtacgaattatgtttgcaactttttatacttttaagaagcgacgaattgacattacacttccccacataccgattaaagcaccgattaacactagtaaaccagctaattggaatacgaacggactgtatggtagaagctcgaaaattgttccgccaagtttttcattaaacacaccttgcaacgaattatacgtaattagaattaggccaattggaataattgatcctaatactcctaagaataatccctctagcaagaatggccaacgaataaaccagtttgttgcaccaacaagtttcataatttcaatttctgtactacgagcataaattgtaattttaattgtattagagattaagaacatcgctgtgaataaaagaccagcaattaacgcaatcccaatgttacgaccagtttttacagtatcaaataatcgttcaacttgcccttttccgtactgaacattactaacaaactgcattttttcaaccttcttcgcgattgtcgctgtatcggttggctcttttgcttttacaacgaatacgtttttaagtgggttatcttgttcaaataactcaaacgtttttccactatcacctaagcttttaattaaacgttttaactcttcttctttagaagaatatttaatagaatctacttttgcaatcttactcatatcttcttctaatttcttttgatccgcttcttttgcagctggatcaatgtgtacacgaatctctacatcttgctctactttcgtcgcaaaatggttcatattcataatcgctgttaaaaagacacctacaagtaataatgtaactgttactgcactaacagaagcaaatgtcatccatccgttacgtgatagattctttacaccttctcgcaaatgtcgactaagggtcttagccttcatatccgtatcctccctcaatctcatctcgaacaatttttccgccttcaatcgcgattacacgatgacggattgtatttacgatatctgcattatgcgtcgccataacgatcgttgtgccgcgctcattaatgcgagtaaaaatattcataatatcaagagctgtttcaatatctaagttacctgttggctcatcggcaattacaacctttggtctatttacaattgctcttgcaatagccacacgttgttgctccccgcccgaaagctcacttggaagtgcgtctgcacgatcttcaaggcctacaagacctagcacttctgttacacgctcacgaattgcatccggttcttcttcaattacttctaaagcaaacgaaacattctcatataccgttaatttaggtagcaatttaaaatcttggaaaattacgcctaattgacgacgaaaatacggaacgtctctttctgccaatgtttcgatagtaagtccatttacattaatagatcctgtagatggtttctcttcacgatacatcattttaataaatgtagatttcccggctccactcggtccaactacgtatacgaattcaccttgtttaatgttaactgtaagaccagcaatggctttcataccattcgggtactccttataaacattcgtcatttttatcattatttatcacccaatacttaatgatttttttcgaaatacttttctgtacatctgaaaataaaagacatccttcattttcatttattcatccttgttgaaggtagtttacttatgctttctcataagcaataccactctatgtaatatatttcagcaaaattctacaaaccccattgtaacatcaaacggtttccaatttggatacatttttgttacagttatgttacataccagaaaaaaggaaaacgagttgactatattatcaactcgtccatttcaccttttttatttatgttcagctaaccattcagatacttttttcgcatcttcaccttgaataagtcctggtgacattgaaccgcggccttttttaataatctcttcgatatctgcagcgtcgtacttaccgcctacttttcttaaatcaggtccagttgcccctgataaatctgttgcgtgacatcccgcacaacttctttggaaaatttgttctgcgctgtctgtgcttgcagactgtttcgaagacttactctcttctttatttccgcatgctcctaaagcaaaaacaaccgatgtccctagcgcaatagccaacaatttctttttcacttctatcgctccctattgttgatattctttttattcctaacacactcattttcattataagcattatctttatatagaaaaactaaggtgtatttcatattcctcaaaaatacagtgagaaccttgataaaataaagctttcataagttgtttcaattctgtgaacaactaaaaaaacttctataaagtatcctttttaaaaggaaaattagaaaagttctatataaatctttaccctattaccgctctattttactattctctactttttacaaaacaatatacagcattgtaatctacatataatcccatcaaaaagagaagttgtcgtttccaacttctcttcctctttacttcatctataaaaataaaatcaaattctttatatcctctattgtcctcagcatgcgccaacaatttcgttggctttttttcgcttattagatgcgagaacgtaagtaagcatcaataaatggatcaatctctccatccataacagcttgtacgttaccaacctccgtatttgtacgatggtcttttacaagagaatacgggtggaatacataagaacggatttggctaccccatccgatttctttttgctctccgcgaatttcatctaattctgcttgttgctcttctagtttcttttgatataatttcgcttttaacattttcatcgcatgctcacggtttttaatttgagagcgctccgactgacatgttacaaccgtatttgtcggtgtatgtgtaatacgaactgctgaatctgtcgtatttacgtgctgcccaccagctccacttgctcggtacgtatcaatttttaaatcttctgtacgtacttcgatttcaacttcatcattgaactctggtacaacttcacaagatacgaacgatgtatgacggcgccctgaagaatcgaatggtgaaatacgtacaagacgatgtacacctttctctgcttttaagtaaccgtaagcgttatgacctttaattaataaagttacactcttaataccagcttcatcacctggtaaataatcaaccgtttctactttgaatccgcgtttttcagcccagcgtgtgtacatacgtaataacatagaaccccagtcttgtgactcagttccacctgcacctggatgtaattctaaaatcgcattatttttatcataaggatcacttaatagtaactgaagctcatactcattcatttcttgaattaagccttttacttctgattctaattcctcatgtaaatcttcatcatactcttcttttaaaagctcatgcgtgatttctaaattttcgaacgtctcatctaactgacggaactttccaaccatatcttttaacgcattcgcttcattaattacagcttgtgcgccttgttggtcatcccaaaatcctgcgcccatcattttttcttctaattctgcaatttgtttctccttagtagggaggtcaaagagaccccctaaaagccgctaatcgcttagccattttctctaattcctgtctaatttctactaattccatttccttcacctctatgtaattgctgttactttcgtatgaaaacaagggaaactctctccacttattacggagagagtttaatccttcttaattatacatttttgatataaaagtttgcaaaacagccaaagctaccgtcctatattactgaacgataccacagcagtttttatattttttaccgctaccacatttacataaatcgttgcggcccacttggtcaccttttacaactggctttttctttgcttcttcgccatcactagaaggatgaacagcttcaccttgcacaacttcttgacgttctaagttttgttcaatttcagctttcataatgtaacgagaaatttcctcttcaatagaagcaaccattgactcgaacatcgcgaacccttccatttggtactcacgaagtggatcgatttgaccgtaagcacgtaaatgaataccttcacgaaggtgatccatcgcatcaatatgctctgtccatttcgtatctacaacgcggaatacaacaaccttctcaaactcacgcatttgctcttctggcataagcttttccttttcattgtatcgctctattaatttcgcgataatcggttcgctcatttcctcaggagcaaggcgacgtaattcttcttcttttacatctccgtcttgaagaaggtttgtatttaagtagtcaacaagacctttaatgttccaatcttcttcaatttcctcttgtgtatgaagggcaacagcacgttctactgtagatttcatcataccttcaataatgccgcgtaagttgtcagactccattacctcttgacgctgtttgtaaataacttcacgttgttgacgaagtacatcatcatattgcagtaactgcttacgtgcatcatagttatttccttcaacacgtttttgtgcagattctaccgcacgagaaaccattttactttcaatcggctgagaatcatccataccaaggcggtccatcattgctttcatattatctgaaccaaatcggcgcattaattcatcttccatcgataagtagaactgcgtaacaccagggtccccttgacgaccagcacgaccacgtaactgattatcaatacgacgactttcgtgacgctctgtaccgataactgctaaaccaacgtttttcacatcgtctccaagcttaatatctgtaccacgacctgccatgttcgtcgcgattgttacagcacctttcataccagcctctgcaatgatatctgcttcacgagcatggtttttcgcatttaagatgttatgacgtacacctttacgcgttaacatttttgaaataagctctgaagtttcaattgcaactgtacctacaagaacaggttgtccttttttatgacgatttacaatatcctcaacaacagcattgaacttaccttccattgatttaaagattaaatcggcacgatcatcacgaataatcggtttgtttgtcggaattacaataacgttcatattgtaaatgttacggaattcctcttcctctgttttcgctgtaccagtcataccagataatttttcatacatacggaagtagttctggaatgtaattgttgcaagcgtcatgctttcattttgaatttctacaccttcttttgcttcaatcgcttggtgtaatccttcgctataacgacgacctttcataagacgaccagtgaattggtctacaattacgatttcgccttcttgtacaacataatctgtatcacggtgcataacaacgtgtgcacgaagcccctgattaatatggtgaagaagtgctacatgttttaaatcgaataagttttcaatatggaaagctttctccgctttcgtaataccatcttctgttagcattacatttttcgttttcacatcaaatgaataatctttttcattttctaacgtacgaacaaatgcatttgcaaacatgtatagctctgttgatttttgagcttgtcctgaaataataagcggcgtacgtgcttcatcgactaaaatagaatcgacttcatcgataatagcaaagtgaagtggacgttgaacgcactgctctttatataaaaccatgttatcacgtaagtaatcgaatccaagctcattatttgtgctatacgtaatatcagcagcataagcctcttgtttctcttcgcgtgacatactatttaagttaattcctaccgttaagccaaggaactcatgaagttgtcccatttcgctcgcatcacgttgtgctaaatattcattgactgtaacaacatgaacaccttttcctgttaatgcatttaaatatacaggtaatgtagatgttaacgttttaccttcacccgttttcatctcagaaatattcccttcatgtaaggcaataccacccattaactgtacgccatatggacgcattccaagaacacgagttgccgcttcgcgaacaactgcaaaagcttcaggtagtagatcatctactgtttcaccttttgttagacgttctttaaattcaagcgtctttccttttaattgttcatcagttagtggcttaatagatgactctaatgcatcaatttgctcaactgtcttttgcatacgtttaatttggcgttgatttacatcaaacaccttttttaaaataccgatcataggaaatacgctcctctttttattaaaataaaacttccgattgttttctttttctctattacaatcagtcgttataaaaatcaaatgtatgttatgccaatttttctcctaattaaaaaaactaaaatgtatatacctaatgataattgtaacacttgtcttataactatgacaacaatcggcaagatgtcgggccttatattcaaaaaaagtttttatttcatttgttacgttccttttctctgtctcgctatttcaatttcacgttacaaatttcgtattaaatctaagtcatattctttcaagtttcctttgaaagaatatgactaccagaaattccttaataaaatctaaatcaacaattacaaaaagccggaaactttgcaggtgtagcatccatagatacttacacctacaaaaaaactccgactttaaaagatattgttatgttgcaaaatctacaaataccattaacatatagctgtatcaatcataaattttattaatttatcggtatttccaattcatgatatttccctttcctatccttcataaaagaaatgaatttcactttagttgattcatttgaaaagtttttataatttttataagggtcatctcctgtaaaataatttgtccctatataccctcgtaccgttttaccagcaggtattacaggatcaaactgatattttttaggtaattccattgaataagggattaaattataaaactcacctattttagaataaaacattgtatcggaaatagacttattactaagcaagttaatatctcgatttgttgtatttgtaatatctaaaggtaacacatacgtcactacttcacggtcttcatagggatcataaacttttgtaggatcaagaggatcaagtgcatgaaacgtaattcctcgctcatcttcaaaagttctattagataaaaactcatcttttaccactttataagattcattatttagatttaatgttttaaatctaaataaactagcaaatatacatagcaacagacacaatccaatacttattaagatatgttttctcgtcactcttaatctaccaactttccattattaacatgtacaatacgatctaccatttcattatctagaacatgcacatcatgactggctacaacaatagtcgttcccttggctttttctactttcaaaatatctaaaacatcttttatcccatcactatctaaagcattagttggctcgtctaataacagtaattttggttgttccattaaagcttgcgctatccctaaacgttgtttcatacctaaagagtatcttttatactttctcttatctgttttatcaagtccaaccctttgaataatattataaatctcctcatcggagattttattgttaatcgatgataaaaatttcaaattctgaaaaccagtataccctggaataaaacttggatattcaatcaatattcccatagaatcaggaaattgcttttgttttccaattatttcattatctatataaacaactccagaattcaagcgcattaaccctgatatagcgcgtaaaatcatcgttttaccagagccattatgccccttcaaaactaaaaattcgcctttttttactgacaaactaatattatctaacacaatatttccttttaatcttttcgtcatacattcacatttaatataattgtccataaattattcacctatcacatctagttttttaaaacaaaaactacctaataaaatcattacaacaacaattactactcctattaaaagtaaatcattatattgaatagattgattattacctaaagtcaattgaattgaactgtgatcaacaaaataccaacgatttggcataacaaaagagcctaaaaaataaatactatgaaagaaaatagacaaaaataggtacaacaacattagtacaaaaacaatagttatcggtatataaaaagttaaaaactcaaaaatcaaagctaataaaaagcttataattatttgaattagcatagtacctaatatcttataaggaaattgactatataaatttaaaaaattatactcgcctaaagaaagcaaatagtaagcgctaaaccaaataaaatacataccaatccaaataataattatataaaaaaacaaagataatattttcgttaaccacagaaaatgcttcttcttaacacgaggaaataaataaacaccattctgttgaatatctgaaaaagcaaaattccctacaagcaacaaaggagtgatttgaaagaatatccaataaaaagggatagaaaatcgcccctccttataaaaataagataaatccacaaaatctactccatgaaaaaatcgataaaaggtaacatctactaatacagattctttaccattactaagaggctgattgtataaaaaggcaattgcaataatagcgtaaattaagaataaaaaaaccattatcttgatggaatctcgaaaccttacatataaatctctttttaacaaataatataagatcataatgtaaactagaccacctctgtctcatcattcatagaaatataactttttttagataaaatccatacacttataaaaaagataaaaaaacagccaaataagcgtataaataaaccagtagcatcttcaaagacatttatataaaaagcatttgtaaataaaaatccatgtaatataaatctatctaataaaacagcagtaatcatacatattattacaagtaaactaggtaaaaataattgcaataaagcacttatcatacatataaaaacactcgcaaataattgaatgcaaaataataatggataatttacatcaacactagttacagccatcatagttgacatcaaaaacaactgtaaaatcatactcccagcaaaaaagtaaacaaaaacgaataattttaaataatatatagaaactaatttcaatgcattattcactctgtaaacaacataaatactaaaaaagttcgacatagaatatacagaaaaaacaattgttaaaggaataaatatagtcgacaaattatacaacgaaataaccttatacaaagcttccaattcgttcattttctcttttacaattccgggttcaaaataattgaacaagcaaccaatgatactaacattaagtacaaaaagaatacttaaccaaacatatttcatccttatagtttctttcataacattataaaagaacatgcttcctactcccccgtaaataaagaactacagaacaaaaccaaatacataacagtacactaagaaaaatttgcaattcaaaaaagccaaaatctttaattaaataatctttaggattgagaatcccttttccaataccaagccaaaaaatatgtaaaataaatggaactaaataaataaaataaactcgttttataaaaaacgaaactgataaagctaaactcgaaaaaaccgcaccgtataaaccatttaaaaatacatacattagaaaatataaagtagggtacttataataaactatatgaaattgagctgttggcgaaacagtagaagccatataatttaatattggatgcggagcaactgttggataagtcatcacatataaataaaaattaaatagtaaagggacacttataataaaaaaagatacgctaaaattaataaaataaagcagcttaaaataataacatgttcccatcttagaaataacaggataaataaatccataatttttatcaattctataaatccctgctacagccattgcggaaagcataggaaatataagtaaataaaactcactataaaacgataatctattaaaatataaaatattagataaatatggggatacctttataatcccagcatcgttaaatcctttagttgtcacaaacatagcaatatattgagcaataacaattactaacataataaataaagacaaccaaaacatcctaccttttaaaatccttcctaaaaagtaactcatctatagctcctccataaaccattaaatttaaatcttttttaatatgaacaattgatccgcaacaccataacatttcttttctttatttaaccaaatgtaacgaaaagaaacatttgctctctctccttcaaatttaggaaactcaacttcatactgataaacatcatttgtgccttttctttttacactcttaacttcttgtttccactgaattacttctccatcagtttgttcaatccgtcccaagagatacgttggttttttcttattcgtaacacccgtcaaaaaaacataataattttctggtataactcctaatttcaattttttatttgaaagcttatcctctattaaactatcatttttttctatttgtccttgaaagaaatcatcaccattttcactttccaaaaacacttgttcaaaaatagtatttttgttaattccttttaattcaatacttttcaaattatctttttccgttaaagtatcttcaatatgtacaataggttcatctactttcttttgacaagaaactaagaaactaatactcaatataaaaaaacaaactaaaatatattttgaaataaacctcattacagctcctcctattttaaaaatgaaatagcaggaaaagtcgtataatccggatttgaaactatacgactttttctagcactataaaataaataatttcaatttataatttctaaatcaatattcaatgtaaggtccactatgtcttacactatcaggactccaagcagtaggataagcattattttctctagaataaccaccaaatctcacaggcacatttttcccatggttttcatatgcataattttgaaaaagatatgttctacctggtatcactgttccttcatgcttacctgaaacatttacccattttctatcttctgcatttttatttttatctgcttctgtccaaacattgaaagaacctccgcccttctcactgctcttcacacgcatatacatagaggtaggcgtctctttaggacgtgcattagtataatcatatggactccaaagtctaaaggtaaaattcacatggtcatcccttgtactagccttagccggttcggttaaagcgaaagtactagctaaaatacctaacgataaaacagatccaaacataaaacgactttttttcttaatgcccactaaaagcacctccgataatttgtagcattatattgattgtatttttccactgaaggaacaaaatcaatataatacaatattatggtaacaacacctcaacacaccttcaatggatttcagaatatttaatattacttttacacttgcgaacatttcgttaaatttttaaaaacaatactatatccctagcaaagaattacttgtaaaggtagctacattcctatgcctgttccaaataataaagagtaactcacctctctaagtttcgaattttctcctgctgttttgaggaaataccgcctaaaaatcacttcttaatgaaatcggctacttataaaacttttttaaccttgctgcgaaaaatacaaaaaaagcgcagccatttcggctgcgctttcgaattattatttagtttcgattaaaccgtatttcccatctttacggccatatacaacattagtttcgtttgtatcagcatttgtgaagacgaagaaattatgtcctagcatatccatttgtaggattgcctcttcaacgtccatcggttttaaatcgaatcgttttgtacgtacaagttctaattcatcttcttctacctcatccaaaacagctactgcttctggaaggataaagttcgttttcatagaacctttctcacgtaacttacgatttacttttgttttatgtttacgaatttgtcgctcaattttatcaactactaaatcgatagcagcgtacatatcgctattagtttcttctgcacgaagtaataaatcagtaaatggtattgttacctcgacacgttgcttgtcagagtatacttttaaattaactttaatctctgggaatgtatcaaaataacgctctaacttacttagttttttctctacatattcctttaatgctggagttacttcaatattttcaccacgaatgttgaatttcatagatgaattcctcctttcaagcctatgtattataatttcgacattggcttaaaaactccttctaacttttttaaaaaaattagtggaattgcgatttttttatcgttttttgttgaaatgaaaagatgcatcgtttctatctttattttatcctattaacatcgtgagtaacgaatataactgtggacaattcgttacagaaaagaaacaactttttgacaacttacactataacaaaaaccccttgcgaaaaacaagaggttctactacatatatataacgttgccacaaacgcagctttctcttccaaaaacaatataccctacagtttcacaacattagctgcttgtggtccacgtgctccatctacaatgtcaaactctacttgttgcccttcttctaatgacttatatccatcttgttgaatagcagaaaaatggacaaatacatcgtcaccatcttcacgctcaataaacccaaatcccttttctgcattgaaccatttcactcttccttgcatgttcattccattcccttcactctaaaaatcagggcattcgccccatattttgactataacgaatgacaacatatgaagtcaaagaagacttatcgcctttttattatccctttcgacactgccatattaacttctacaaagtgtcaaactagatacttctcttgcccctctttcatataacaaacttccgatttgcctaactgtaatccctgtcgtatacacgtcatcaacgagtaaaatatgttgctcagaaaacatctcttctccctgaaaataaaaaggattgcttcctgacaccctttctttacgtgtcttcttactttgcttttctgtttcccttcttcttaatgatggataagaaattttgacaggcaaacaagttgctaataactcagcttgattaaaaccacgttcaatttccctttccttactaagcggaacagcgataacggttgaaacattggcaaaatacttttgaaataaacttcgaaaaggacgataaaaaatgtgcactaactccgcatccccccgaaacttaaactgtgctactatttctttcatctcatcatcatacatatataacgaacggtttttaaaagaacgatacttctcctctttcgtccaccttatacaatctatacaaataccgtcttcttgaaatgcggcaggaacaaattctaaaggtcgcccgcactccatgcaaatttctcctataatataggaaagtttctgctcacatctatcacatatatattttctatgacactttacaaaaaaagtgtaccaactaatcttttctacaaaacactcatcacaaagtaaacaatgcattaatcgatcaatccttgttctttcgcatttttattcataccttgaatatgttttttcgcgcgcaccatcgcctctgtcttgccatagtgaaaataaatgacctctccatacggtgcttcaaagctccgccctgctcggcccgcaatttgtacgagcgcactttctgaaaacatttcttcttccgcccccaaaactgcgacttgcaaatttttcaccgttacgcctcgctctaaaattgtcgttgtaactaataatgggatttctccctttttgaaagccgctactttttcttttctccctggatcttctgcatgtacaccttcaattcgattgtttaatggttttaacaacaagcttatttcttctatatatcgcacatgggggacgaataaaaaaatagggaattttttatttaagtatgtttgtaaccactgtagtaaaactcgaggaattcttttatgaatgaggttttttttccaattcccgcaccaacaaaataaaggaactggcaaaggatgacgatgatatcgtccagaaacaataacacctttttgtttaccttgtttaagttttcgcttccacgtttcatctggagtcgcagttaaataaatacgcgccgctttttctttcatcgcttgttttaccgcgtactgtaacatttgatctgcacaatatggaaacgcatctatctcatctacaaccatgacatgaaacgccctataataacgtaataattgatgcgtagtcgcaacgactagtactgcatctttttctttatccacactccctccatataaagccgctacctttatatatggaaatacttcttgcaatctcggtgctaattccagaacaacatccgttctcggcgttgcgatacaaactctttctcctttttgaagcgcttcgttaattccgtaaaacaacatctctgttttcccagccccgcatacagcccaaataaaaaatgattctttttgcttaatagcctctataactccttgcgccgccaaattctggccagtagacaacgtcccgttccactgtaacaaatttgaattcttttctctctttctttcagcaatcccgcgaacaagtacagcacattcacttactctccccatcgttatacacttccggcaatatgcgcacactttactgcaccttttacataaaaacgacgcaaatagccgccgatctacatttccgcagcgttggcacatatatttagaattcttcttttttacaccttgtacacatacgatctctcccttctttttcaaatcgtttaattccctctgtaaatctgaagaaagttcttctaatagcaactgtttccccgctagcatcaacaatcacctccagcactactataaacctttctcatcatctcgtaaaaactcaaaaaagccgataacctacttataaaatagtaagctatcgactttatacacggtttttattcttttataaatcctagaatcgaccgtatcctaagaaatgtttttggttatacgaactgttaatatcaccgtacgcaattcctttatcgctagcatggatcatttggccattaccaacgtaaataccgatgtgagatggacctgctttataagtaccttggaagaatactaagtctcctggttgtgggctatctactttagaaactgagttccagtaacccctaacgtcttgacgacctacaccaaagatgtaagaaatgaatccactacagtcaaaaccaccgtttgatggagatgcacttccccaaacatatggtaaacctaagtagctttgcgctttaccaattacgccacccacatttggagctggttttttctcttcttgtttaggtgcttcttttttaggctcttctttcttaggctcttcctttttaggctcttctttttgagcttgtccaccattgtttgctggtgcagcttgctctgcaggtgcttgtgctggttgagcttgcgcagctttagcagcttgctctgcttgtttttgagcagcagcttcttgtgcagcttttgcttgtgcttcttcttcggcaatgcgttgtaattgtaatgcttgtttctcaagctctttcaattgaccttccgtacttgtcattgaagttacaactgtatccattttaccgcttaaatcgtttaccgctgttgcttttttctctttttcagcgtcaagttctttcttagcagtttcaatttgagcttgtgcttcttttaattctttttgtttttcttttaccgttgcaacatcttttttcacactagcttggtcttcttgttgtgttttcatgatatcttcatcagactcaagaattttagaaacagaagttaaacgatcaactaaatctgcaacgtttttagagtttacaagaacttctgttacaacgttcgtatttggttgttcttgaagtgcaactaaacgctttcttaatagctcttcacgttttgcaatctttgtttgtaattctgcaatatctttatttttcttttcaattaattgctcagtatcagaaacttttttcattgtttcatcaagctttgcagcattctcttgaacagatttatctaaaccttgaattgttttgtttaagtcattcatttgtttttgtaattcatcacgttcttgttgttgtttatgtaaagtgtcattttgtgtgttaatttgtgatttcacatcagaaattttatcttctgcaaatacatttggtgttagcccagaaaacattaatcctgcaactaatgcacaagatgccatttttagctttttcattttattttttacaccgctttcttttttctttttccgtatataacctataaaatttataccataattcgggattttttttgctaatgttacgtttttgtaaaacaaatgtaatattatatgtagctctagcgcaaaatgcgtatatttttgtatgtatgtgtagaaatttatatacttttctcacttctataaacaaagaaaaaacgtaaggaattccttacgttttattaaatatacgaatacagatgaaatgctacttcatccatttctcagcccaattttggacctcatccataacactttctaacgcttttcccttgtcagttaagccatactcgattcgaactggtacttctggatagacattacgaactacaatgccctcgctttccaattccttcaaacgctctgacaacatacgatcgctcatatttgggataatatctgcgatttctctaaaacgtttcgactcttcaagcaaagatttaataattaagccagtccacttcttactaagcagagtaaaagctgactcaaactttggacataaacaagaattatgctccatatgtttcacctctcttccattataatatagtttcttgtaaaaagtaagttataaaactttcctcattattttattttacgtacattttaccatttccaaatattaacttgtcaactaaacgtaacatacccgtaaaaaaaccctcttaaaaagagagctttttatatctttattacttcgtataccatccaagacctaatgcaccttcacctaagtgcgtaccaattacagccccaaaataacctgtacgaattgtgacgtgaggatattttgcttctaattctttcttccattcattcgcttcctcttcacgttgcgcatgaatgataactgcttccataggtacacctttacttgcttgctcatcaaaaatttcaatgatacgttttaatgcttttttacgtgtacgaatcttttcaaacgcaataatgattttatctctaaaatataaaactggcttcacttgtaacagactaccgatgaaagcttgcgcgctatttaatcgaccaccacgttgtaaatgatgtaaatcatcaactacaaaataggcgtccatcgttttcttcatttcatcaaaacgagcgataatctcttttggattctttccttcacttgctaactttgcaccttcacgcacataaaatccttgtacttcacaactaatttcagagtcatacgtgtatacatcaataccttctaccatctgtccagctgtcgttgatgtttgatatgtaccactaattccacttgataggtgaatactaataactgcatcataatctttagctagttcttcatatagctcaacaaactttccgattgctggttgagaagtttttggaagttcctcttgttcacgtactttcacataaaaatcatctgctgaaatttcagcttcttcttgataagattctgttccaaacacaacgtttaatggaatcatatatatattgagttcatcacgaatttgcttcggtatatatgccgtactatcagtaacaatagctattttcattttcgtacctgccttataaaaagttttatttcctaattttacacgaaaactacaaatggtgcatccatacatgaaaatgccggttgaaattatacctaccatctcgacaaattacaacaaaaagataaaatactcaccaaaaacttcagcatatttagaaaaaatgtttgaatataaaaaggctcgcttttaaaatggaaagtactagtcattttgatagataggggcgtacacaattgctattacaatattttacaatcaaagactacggcgaacacgaaatcgtcattcaaaaatcaagatttatttgttatattagccgagcaacgactgaggaagaggctcaagaatttatacaaaaaataaaaaaacaacattggaatgcaacacataattgttccgcttatttaattggcgaacaagatcatattcaaaaagcaaatgatgacggcgagcctagcggtacagctggcgtaccaatgctagaggtacttaaaaaacgtggactaaaagataccgttgttgtcgtaacacgctattttggtggcattaaacttggcgcaggtggattaattcgtgcatatggaaagtgtacaagcgaaggcattaatcatgtcggtgttgttcagcgaaaactaatgcgtgtgatgcaaaccgagattgattacacattacttggcaaagtggaaaatgaattacgcaattcaaaatatgccattaaagatattcattatctagaaaatgtcacatttgatacgtatgtagaagaagacggcaaacaagcatttacagattggatgattgaattaacaaacgggaaatgtacaattacagaaggagatatgttgtacttagaacaagatgttatctaagaataacccatttatcaccttcaaagattaatgtagtgaattacttccctacaaatgaactaacgaactaaggagattatatatggaagaacgttattatcatctccaaaatagcagaataaaaaagaagcgaagaaggaaacttttcttcttccttattttcgcatttttatttggcagcataggagtttatgtgttaaattcttactcttctcttatggggatgtatagtggttttactcgtgaaaaatcggatttaagaaacgaagatgtagaaattacaaaggaaccttttacaattctcattatgggtatagaagattatgcgacagatggtcaaaatggtcgtacagactcattaatgtttgcaacagtcaatccgaaaactaaaaaggtttcacttatgagcattcctcgtgatagccgcgttccgattgttggaaagggaaaagaagacaaaattaatgccgctcatgcttacggtggagaggaaatggcaatcaaaactgtagaaggttttctaaaagttcctgtagaccattatattaaaattgatttccaaggttttaaaggtatcgttgatgctgttggcggtgttaccgttgacgtacccttcgatttttgggagcgctctgacgtggattactacaaaaaaattcaatttaagcaaggacagcaaaacttaaacggtgaagaagcacttgcttacgtccgtatgcgaaagcaagatccaaatggcgattatggtcgtgctgctagacaaagacaattactggccgctgttgcccaaaagctaaactccacctctactgtatttaaaattaaagatttaacgactgtagttggaaaatatataaaaaccgacattcctatttcagacggacttgctctttacaataaactctctggatttgatccttctacaatacaaacgttaaagcttgaaggcgaagacaaaaagataggcggtatttattacttccttccagatccaatcagtgtcgaaacggtgcgtaacgaaattgaaaaagaattaggagaaaaagcaaaaaacccaactacaaaaaacaattcaaatcctgattcaaattcaagttctaattctaacgaacaaacaaaaaaagcaacaaaccaaaataaaacaccaactgatccgccaccttctacaaatgctcatgcagagtggattatgcgcaatcagccgtaacaaaaaggcccaatctatgcgattgggccttttttatttacttattaaagtgctgtaaaattgcttctacaatacgctctgatgcacgaccatcaccgtaagggttagatgctttcgccatcttatcatgagcttctttatctgataacagctcatcagcaagaccaaagattgtctcttcgtctgttcctgctaatttcagcgtacctgcttcaataccttcagggcgctctgttgtatcacgaagaacaagaactggtacaccaagtgatggagcttcttcttgtacaccaccagaatccgttaacattaagtatgaacgagctgcaacattgtggaaatcaattacatctagcggctcaattaaatgaatacggttatgttcacctaaaatttcatttgctatttcacgaacaacagggttcatatgaacagggtacacaacttgtacatcttcatgtttgtcaacaagacgcttaattgcacggaacatattacgcatcggttcacctaagttttcacggcggtgagctgtcataagtacaagacgatcatttccaagtttctctagtacaggatgactatatgtttcttttacagtcgtttgtagtgcgtcaatcgctgtatttcctgtaatgaaaatacgtgactcatctttattttccttctgtaagttcgttgctgattttgctgtcggtgagaaatgaagatccgccattacacctgttaattgacgattcatctcttctgggtatggagaatacttatcccatgtacgaaggcccgcctcaacatgacctactggaatttgattataaaaagcagctaaacttgcaataaatgttgttgttgtatcaccatgtacaagtacaatatccggcttcgcttctttcattactttatccaaaccttctaaaccacgcgttgtaacatcaattaaagtttggcggtctttcataatatttaaatcgaaatctggcgtaattccaaagatacttaatacttgatctaacatttggcgatgttgtgctgttacagtcacaatcgattcaattttttctgggtgtttttgcaactctaatacaagaggtgccattttaattgcttctggacgtgtcccgaaaattgtcattacttttaaacgttcagtcatgtgattgcctcttttctttcactaattacagcttctattatgacatataaaaatatgcatgagtacatccctttttaacgcataacagaaacttttctattacaaatactttttcttcccaccgagtaataatctatcttttgtttcttaacatcttcatcagtataacaatttctcccatcaaataaaataggctccctcataagttgtacgtacttttctaacggatacgtttgaatatctccccattctgttacgataaaaaccgcactcgcatctctaatcgattcatctatacatctactatattgtatagcatctccaaatatattctttacatattgaattgcttttgggtcataaagaacaatatctgcacctatattaattaatgcttctattataataagagatgatgcctctctaatatcatccgtattcggtttaaaggatgcgccaagaactgcaatccgctttttattcatgttcataacttttttcgctttttcaatcaatagcagctgttgcttattatttacttcaataactgcttttaacaaacgaaaatcatgagcaacatttcccgcaatttgtaccagtgctttcgtatctttcggaaaacacgaccctccgtagccaatgcccgcatttaaaaaagatgcaccgattctcttatccattcccatccctttggcaacatccaatacattcgcgcctaccttctcacatatatttgaaatttcattaatgaaactaatctttgtagctaaaaaggcattcgacgcgtatttaatcatctccgcacttttaatatctgtaacatacgtttctaaacataattcactatacaaactctctactcttcttgctacttcctcactatccgctccaattacaatacgatctccatgaaagaaatcataaatacctgaaccttcacgcaaaaactctggattcgatacgatatgtactgtatgcctcccttttaacttctcctcaatccatcccttcattacatcatttgtacctactggaactgtacttttcgtaacaacaataatatcgttcgtcgcatataatccaatatcgttacaagcactctgaatatacgttaaatctgccgtcccatctaataaaggtggtgttccaactgcaataaatataaactctacatcatcaaatgcctcttctttatttgatgtaaaagttaaagcattattctcatatgcataatttattaattcatgtaatctggcctcataaataggtaaatccccttgttttatccgttcaattttttcatcatctatatcaaaacatgtaactgaatgccctaattttgccaatcctactcctgtaatcaatccaacatatccagtacctactatcgtaattttcatttccttttcgcacaggaatttacaatagaaaagatatgaaatatagaactcttcctgtgcttcctcctctcatattaaaaatgagaaaaaccttttccttcttcattatatgaattacttcccttattttttttaaagtttttgtaaaattaaatgcactataaagtaaaacttaatcagtgagaatccggctgccagttcacgcgtgataaattcccacattttaacacgaaacttactcatttctaggtgcaacacttataatactgaaataaaagtattcactattgaagaaaaagaggaaatgttacattccaaagcccagtacaattaaccttcttatatgattcaacattctatatacaattgtcatatattctatccgtttccattaaccgtaaaaagaaaaaaagattgaattctaatctttttgtgataccatatgttatgagcctgtaaataaacatcataattttcagataaatatattttcaaaaaaaaattacgttagactataaagggtggggtattaatggactcacaagtgatttatgccattttggcatcattcatcactgtactcgtcgttactcctttagttattaaattagcttttaaaataggagcgacagataagccaaacgcacgtaaagtgcaccaaaagattatgccacgtcttggcgggttggcaatatttattggtgtagctgtaggatttgttgtcggcggcttatatgaacaaagaatgttatcgataacgctaggtgcgattatcattgtaatcatcggaattttagatgatatgtacgagttatctgcgagagtaaaattcggtgggcaactgttagttgccatgatgattgtaaaaagtggattattagtgcaagtattatatatcccattccttggggatactgaacttggatggcttgcttatccaattacagtattttggcttgtaggtattacgaatgcaatcaacttaattgacggcttagatggattatctgctgggatttcatctatcgtacttgcaacgctagcatatatggccttcactagcccatggggtactggaacagctattatcttgccacttgcattaattatattagcaagtacaattggatttttattctacaacttccatccagcaaaaattttcatgggagatacaggagcactatttttaggatactgtatttctgttatatcgttacttggattatacaaaagtgtaacgttattcagttttatcgttccaattatcattttaggtgtacctatatttgatacgatatttgcaatcatccgtcgtatcgtaaataaaaaacctatttcagcaccagataaatcgcatttacatcaccgcttacttgcaatgggattctctcatcgcaaaacggtactaattatatacgcattcggtattttctttagtgtaaatgccattattttcactagtgcaacgttatggttatccattattcttcttttcgctttgattttcttcacagaaatcatcgctgaaataatcgggcttgtacatgaacgctacaaaccaatcatttccttttataaaaaagtgaaaaaacgcgaagactaattgtagtatagccttttcaattatgaaatattcaaatagcatcctctttcttataagaggatgctattttttattctcattttatatttccaaaatatagattgtttgagagttcctctattggagaaagctatacataataagaaaagtatcaagttttcttttttacatcttgattgtcaaactgagggtgaatgttatgatcaagcgagtatttcaatgtattattttatttttaacgattactatgtacgtatcatctaatactgaagcaacaactgttattcctgctgaatatcatccaaatactgaaacaacttctcctacacaaaaaattgcgtacttaacatttgatgacgggccaaacaaatatactacacaaattttaaacatcttaaaagaaaagaacggaaaagcaactttctttgttattggcggaaaagtgccacattacacaaaaacgatgcaacgattaattaaagaaggacattatatcgggctccacagcatgtcacatgatgtaaaacgcctttacactggtgacccttccactttaattgcagaaatggagcaaacacaaagcattgtccagcaagttacgaaattaaatacacatctcgttcgcgttccatatggtagtatgccttatttaaaaaagaattaccgtgacgcacttgtatcggcccagtataaaatgtgggattggacgatcgatacatacgactggaaaagctatgacaatccttctgccatactcgaaagagtacgtaatcaaagtgatgaacaagtcgaagtcattttaatgcatgattcgagtgtaaccgtacaaatactgccaaaagtaattgattacttacagtcacaaggatacaaacttcttccctataatccttcttctcatctcaaagtgaatttttggaaagacacaagattgtaacagctttagcgcctatgtgctaaagctgttttatttttctcttcccacccttcccatttttgtgtaaaattttaaatagtgatgaagtttcgaggtgaatagaaatgaaacgaatagatctcatttttaacgcaatacaaaaaggcaattatacagaaggtgtaaccgcatcagaactcgctacatttctgcaactagatcgcgccaatgtaagtagcgatttaaacaaacttgtaaaagataaacgtttattaaaaacaaatacgcgacctgttcgtttttacatagaaacgaacacttcgttggaaacgcattcaaaagacataacttcattagatacatttgcaattgaaaatacgagccttaaaattgcaattgaaaaagcgaaagcttctattctctatcctccaaacggtatgcatactttactactgggagaaacaggggtcggaaagtctatgtttgcttctttaatgcacgaatatgcaattgaagttgaacagcttccaaaagatgcaccatttatcgtatttaactgtgctgattatgcaaataatccacagttactactcgggcaattatttgggattaaaaaaggagcttatacaggagcaagtgatcaaaaagggttaattgaaaaagcacatgaaggaattcttttcttagatgaagtacatcgcctgcctccagagggacaagaaatgcttttcacctttattgaccgcggagtataccgccgccttggagaaacagagaacgaacgtaaagcacaagtattaatcattactgcaacaacagaagaaccaaattcatttttattaaaaacatttacaagacgtataccaatgactgttacgctgccaccacttcgtgagcgtacacataaagagcgctttgctttactacagcgatttttcacaaatgaagcaattcgtctgcgaaaagacattcacgttagcccaaatgcaatgcgtgctttcgtcttttacaattgtcccaataacattggtcaattaaaaacagatgttcaaattgcctgtgcgaaagcctattctgatttggtcacaaagaaacgtgattctgtctatgtttcaagttcagatttaccttggtatatgaaagaagggttgttcattgaaaggaagagccgtcacttataccaaataccaaatgaaacatttgtatttacaggtgaggaaggttggagtaatcataaaacagaagatgaaaaacgctcttctatttacgattatattgattataaatacgaagaacttcaagcacgtggtattgaagaggaagaattagaattactaatagaaaatgatgttcaaagctttttcgtacaatattttaaccaaatatcaaaaaaaacaagccatgaaaatgtttttaaaattgtggatcgtaatatcgtttccgtatgtgaaaaaatagcggaacttgctgaaaagcatttatctaagacgtttgatgaaaaagtatttctcgctttaagtttacatgtacagacaactctacaacgtttacaaagcggcaaacaaatacatcacccacaattaaatcaaattcgtacgaaatataaagaagctttttccgtagctatgcaatgcattcaactactggaggaagaattacaaataacaatgcctattgatgaagctggctttttaacaatgttcttcgttgttgatccaattcctgcctcacaaacagaagtaaaagtattaatattagcacacggtaatggcatcgcaactgaaatggcaaacgtcgcaaacgaacttctcggcattgaggaagtaaccggtattgatatgccgttacacgaatcaccgaaagatttcttggaacgtgtgaaagtgtatatgaaaacactacaaaatgtaaatgggcttctcttacttgtcgatatggggtcacttgcttatatcggtgacatattagaaacggagttcaaaatccctgtacgtgttctctcgatgacgagcacaccacacgcactagaagcagctcgaaaagctcagctcggttattcattagatgcgctgtatgaaacagtaaaaaatttaacaccattttacttaaacgtacaagaagaaaagaaaaaacctctctctccaatgaaatctgttattttaacagcttgcttaactggtgaaggaagtgctttagctattcaaaaaatgttagagaactatttacgatttgataaagacttaattgaaattattccaattagtatcgtccatgaaaaagatttaacgaaaatgattgagaacataaaaaaagagcgtaacatcatttgtattgtcacgaatttcgatgtgcaagtaccatgcttaacatatcatttccaagacatcgtaaactacacagcgattcagccaattcaagaattaattacgtatgaagaaacatatgcaaaaatggcggatattcttgaacaacaaatgcagcgtaacgatggagcattacttatcaaaacaattcgttacgcattaaatacaattcaggaattaatttccttacagctaactcctgatagcttaatgggtgttattctgcatatgagctgtatggttgaccgtcttcaaaaaggagaaagccttcttcctcaccctgataaagagaaaagaagacaagatgagtactggatgtatatgaaagtaaaaaaagcgttgcaaccaattgaaaacacatttgaaatacaaatacctgatgacgaagtattttatgttatggacttctttattaaaaatcagcctgtgaaaaattaatcgaggccgtttttaaaaatatcgatcgtaacgtgagttatatcagcgattttcaaaatatatcggcgcaacccagattatatcagcgattttcaaaatatatcggcgtaactcagattatatcagcgattttcaaaatatatcggcgtaactcagattatatcagcgattttcaaaatatatcggcgtaactcagattatatcagcgattttcaaaatatatcggcgtaactcagattatatcagcgattttcaaaatatatcggcgtaactcagattatatcagcgattttcaaaatatatcgatttaccgacaataattgctaaaactagcaccttatataatgagaaaaggctgttccaacatatggacagcctttgcctctatttctttacttttctaactcgccctcttatttctcctcttttttgtgatttcgtatggacattaacatatacatttgcttgaataatttcttgaagtaaatgtacgaatgatttcccttgtaaaggtccctcaaaatcctctacattcactacaccagtaatacttccctcgttcaagctaatcccttgctccagtggaccatacaaatataaaacaacaggaccaatttgagtagacttccctaaatgaatttgacaagatgtaaccttttctatattttttagtattactctgtaatgcaatttcgttaaatcatcactaaaaataaactctgctaccccaaaagcttctgtatttacaggaggcacttccctcttacctgttaacctggcaaagaaatgtgttgtcataaggcattctccttatataaatttcccagcactacttctactactttatggtttaaacataatcatttatgactttttcaattttaattacaaagaaaagattcacaaaatctttacattgtgattgttcctgtagattgaaagtctcttgtataatgcacatagaaaaacattataggaggttccattgaaaactaacaaatacacttttcatacattattagagatttttctcgtctcatttaaattaggacttacttcattcggcggtcctgtcgctcatctcggctatttccaccacgaatacgtgcaaaaaagaaaatggatggatgaacgaagctatggagatttagtagcactatgtcaattccttcccggtcctgccagcagtcaagtcggtatgggggttggattattacggggcggtctattaggagctattatttcatggattggattcactttaccgtctgtgcttgttttggttttcttcgcctcattccttaatcagttcgatcttggaagtgctggctggattcatggactaaaacttgtagcagtcgctattgtcgctcatgccatatggggaatggcgcgaaagttaactccagatcgaaatcgtgcaacgattgcgattgtaactgccgcaatcgccttattatggccaagtagttggacacaagtcatccttattataatatgtggctttatcggttggtttttatatcgcaaccaaccaattagccaatctcaaaatataagagtacctatttcaaaaaagatagcagtttcttgcctcgtcttattctttggactattactactgctaccaatattaagaccgttctcttattacatcgctttatttgacagtttctatcgctctggcgcacttgtatttggaggaggacacgtcgtgctgccccttcttgaaggtgagttcgtacaaaacggaatgatgacgaaagaacagttcctagctggatacggattaacacaagcagtaccaggaccactatttacattcgcctcttatataggagcagtgttaaacgggacgcttggggcaataatcgcaacaattgcgattttcctccctgctttcttactcgttattggtgttttaccattttggaacaatgtgagaaaaatatcattcatacaaggcgcactacttggtgttaacgccgcagttgttggtattttaattgccgctttttacgatcccatttggacgagtacaattataaatgcttcagatttcgttttcgcttcgcttcttttttgcttactagctttttggaaagcaccgccttgggttatcgttatacttggagcttttggcggatatattctatccattttgtaaataaaaaacgacggcatgatgtagccgtcgtttttctattaaaacttcacaagttctatcccttcaggcaactcactctctgttaaaatacgcaattccttcacacgatccattacgtaagaagaacgcttcacaagctctggatcaatataagctggatgaaccataatttctaccgtttgttcaccttgtactctttcttttaacttcataaagtaatcttccgtcacaccatccgcataaaagtcactgtaaaatacatcagaaaatggatgcaccgctctatcttccccacaacgacgaattggaacattatatttagctgctaatctctcaagaacatcgtgtaagatcggtaatccgtgtacatgatgatgactatctaaatgagttggtgttaatccgtaagataggaatttctcaatttgagcagtccactctctctcaacttcttctggatttatattcccttcccttacaacactttgtttatgaaacgatccgtcgctacctacaagtgatggtacgtctccaagaagtggctcccctgctgttaatacgagatgtacgcctactccgagtaggttatactctttcgctaagcgtaccgcatgctctgttcctggcatattcatcatcatcgtcgttgaatttacaagtccatttatatgaccatcaataatgccgtaatttgtaccttctgtaagaccgaaatcatctgcatttacaattaacttaatcatcataatacctcctaatagaataaaaaaagcgggctaaatagcgccgcttttacttctctacctttttaaagaactgtggaagatactctttatgtgcttccaacatttcatctaaaatttgttttgcaactttatctgatggtacaagcggattgattgtcatagcaagcagcgccttatgataatcccctgtaacagcagcttcaattgttgtgcgctcgaatgatttaatttgttgtactaaaccgcgaactggtactggaagatctccaactgcaattggttttgggccttctttcgtaataatacagttcacttcaacagctgaatcatgtggtaagcttgcaattgttccgttgtttcgtgtattaacaggctggatatcacctttattattgtaaatagacgtaattaagctacatgctgcatcactataataagctccgccacgtttttctaattgtggtggtttaatatctaaattcgggtctttatataactcaaataaatcattttctaattgttttactacttctgcacgtgtacctttttcaacagaagcttctttttcttcttctaacatttcacgtgttttgtagtagtaacgatggtatggacatggaatcgcacgaagtcctcgaataaagtctggctcccagttaagcgctgcgatattttccatcgtaatttgtttttctggatctgtcacaagctctaacacacggtccattacacttacgccatctaagtatacatctagtccgtataccatatgatttaaacctgcgaaatcaacgtgaacacgactcgcatctacttcaagtaatcttgcaagacccatacgaattccgattggaacgttacatagaccaactactctttgaatatttgtataacgaagaactgcctctgttaccataccagctggatttgcaaagttaattaaccatgcattcggacagagctcctccatatctttacaaatatctaaaataacaggaatcgttctcaacgctttaaataaaccaccaggaccatttgtttcctgaccgattacatcatattttaatgggattgcttcatcttttgcacgtgcttctaataaaccaacgcgaagttgtgttgttacgaagtctgcatcttttaatgcctcacggcgatcaagcgttaaatgtacctcgattggtaaacctgattttttcaccatacgtttcgctaagttaccaactatttccaacttttcttttcctgcctcaatatctactaaccaaatttcacgaacaggaagctcatcataacgcttaataaatccttcaattaactctggtgtataactagatccaccgccgattgtagcaattttaattccagtcatgctttattcccctttcgcttcaagctttttataaagatcgataaactctgctgctaattctttcactgtaatcgcattcattaaatgatcttgtgcgtgaattaaaagaacactaacctctgttttttctcctcttgcttctgattgtatgagctctgtttggaaatgatgcgcttcattaatcgcttctttcgcctttaccatcgcttcatctgcttctaccattttcccctgtttggcaaattgaagtgcctccatcgcaaagcttcgtgcgttaccactatttaaaatcaattggaatggaatttgttctgctgtagtcatcataattaccgccctctctataaggttcaaccgatttaaataccccttcagtttgaacatgtctattaaattattattttatgaatgatagtttggtgttcttgtagatgagtatcatctttttgaacatgatataaaggtaattattctgacgagctataggaactcgccagaataatattttttaaagtgatactgaattgtcgcttccttttgtttcagcttttgcagcctgtacataagtacggtcacacattaatacgaatggatagtaaattactaccgcaatagcaaagttcaccacttgtagtgctgcaccagcgatgcttccgcccgatacaagataaccactaaagattggtggcattgtccatggaactaacgcaactgtttttggtacccatcctaaagtgattgctgtataagaagtaataactaatacaactggtgtaagtacgaacgggataattaacgttgggtttaatacaattggcgtaccgaaaataactggttcgttaatattaaagaaaccaggaccgatagatacacggcctacaccgcgaagctgcgcacttttcgctacaagcattactgccactaagaatgctaacgttgcacccgatcccccgatatatacgtatacatcaaagaatggttttgtgaagatatgcggtacgtcatatgcagacataccatcattaaataatttcatatttttctctaatgctggtaaatagattgggtcaataatccccccaataatatttggaccatgtaatccgaagaaccataatacgtgaataagtagagcaataataattgcacttggtaatgtacccgctaaaccttgtaatggtaattgaattgtttcaaataccattttatgaatgcttgttcccgcaagtttcacagctaattgaatacctgctgttacaatcaaaataacgaatgctggaactaacgctgcgaatgatttcattactgccggtggaacaccatctggcattttaattgtaatatccctttgaacaaagaatctaaacacttctgttacaagaagagccactataatggaaacgaatagaccttgtgcccctgtccacgctaaatcaataccgccttcttttggcgttgtcggagaaataataattaatgcaccgaatgtaatgattgctgctgacaacgcatcgacgccgtaagatttcgctaaattgtaacttatcccaactgcgactatgagggcgagtatagcaaaggaaccagtccacataccgccaccgacatctttccaagcgtcaccaaatgtgcccttcataaagttttggaaagcatcaattggtaagttatttataagtactgcaaatgatccaactaaaataagaggcataactgcgataaatccgtcacggattgcaactaagtggcgctgcgatccaattctacctgcgactggaactaaatatttctccataaatgcaataaacttttgcatttcgcttcccccctaattattttttaagtgttaatgcgtgatctaaaactgcttctccattcatcatgccgtagtgcattggattgataacgtcgattccaacatttttctcgtcagcaagcgttttcattgaagagagcatgtaacgaacttgtggtcctagtaataacacatctgcttgatcgatattcgtttttactgcatccccagatacagcccaaatcttgccttctagaccgcgagcttttgcagccgcttccatttttgtaactagtaaacttgtagacatccctgctgaacaacataataaaatattcatttgaaaatcccccttgtgtagtataaaaaatttatgtttatttatttttctttacgctatttattaatgcaattagcgtgccaactttttaaaaccactaaaatcagtgctttttcgagcattttctttgtgtgttaacgctttcaattagtgtgtcgtccaaaaaatacacagtgtgttataaaacaacacgcttttaacacataactgtatgaaaatagattagtgtttagtcgtctagttgtgtttaatatgaaaaaacactaaaaaaactttttcaatgaaaaataattcattattttaacccactatttagtgaaataaaaaaaccttgcataagcaaggttcattcatccaccgacatcttcctatataactctacaaactcactcgctaattctttcaccgtaattgcattcattaaatggtcttgcgcgtgtaccattaaaagagtaacttcggtcttttcgccaccagcctctttctggataagctccgtttgtacgcggtgcgcctcctttaattcctctagtgcttcttgtaatttagcttcagcttctgtaaactccccacgcttcgcacaatcaattgcttccattgaacaacttctcgcgtttcccccatgcaagattaaatgaaaagctttcgtctctatcgtatccattgtagttctttactcccccttttcttccgccagtttttgtttatcccatatttttaagaacggtaaataaatgaagaatgctagcgcaaagttaacaagttgcaaaataacacctgaaattttcccgcccgatcctaaatatccactaaaaagaataggtgtcgtccaaggtacagcggccccactcggacgtgcaacccatccccattccattgcaaagtaagaaacaattgttagcacgactggaactaatataaatggaattagtaaaagtgggttcatcacaatcggcataccaaaagttaccatctcattaatattaaatataccaggtgcaattgacaatctccctaaactttttaattgttgacttcgtgcaaatagtaacattccgacaactagagcaagcgttgcaccagaaccgcccatataaatccataagtcaaaaaactgtgccgtaatcgtatttggtacatcttgcccagcttgaaaagcaactcggttttgatccattaacgacaaccaaacggggctcattacaccaccaacaatagtagcaccatgaattccacaagaccaaagaacatgaacgagaataactgctattatcgcgccccaaagactagcaccaagtacactaagcggttcctgtaaaatttgtcctacaatattatggatactgccaaaagaagtattttctataattaagcgtaaaatccaaataactgttacaacaataaatcctggaacaagtgctgcaaatgaacgcgtgacagctggtggaactgtctctggcatctttataattatctttttttgtacaataaaccgataaagttcagtagatataagtgcaataatcattgctacaaataacccttggcttcccattaatgcagctgggatagcgccttctacaagtacactttcttttgtacttggtataatatatgcaacttgaaatggagtcgcaagtaaaaacgtcacaagcgacaatgccccggatgctaaagcatctactttataatactctccaagtctgtaagcgattccaaaaacagctattaaagccattatattaaaagttgcactaactggataccctaaagctcgctgccaattctccccaaacaaacctgccataaaatcgttatatcccggtatcggcagtgcactaataatgaggaaaaacgatccaataattaagaaaggcatcgttaaaataattccatctcgaattgcttgtaaatgcctctgctctgcaaccttccctgctaccggcatcacatacttctctaaaaaccgtatcatctatcccactctcctcatggtttcattaacaaagctgcttgcaagatagcttctccattacaaagtccgtaatgaacagattgaatgacatcaacaggtatccctttatccttacatagttctttcattttcggtaataaataacgtacttgcggtccaagtaaaaggacatcagctttatcaatatgactattcacttcagaacctgatactgcccagattgttacttctatccctcttgcctctgctgctttctccatctttgtaacaatcaaactggaagacattcccgctgcacagcaaagtaaaatatttatcccgcttccctccccctttttctctacctaagttatggtgcatcccttgccaccactaggttacaaatatatatgtctagatttcctgctgtatgccgagcttaaaaacaaaaatttcttcgttttcacgctattccatttatccgtattctcctagtaaagaggacgctaactcgctataataattcagtatgatttttttaattgataggaggatatatttatgaaggcatatcgctttccacttattttgttatcttctatcctaattggtggtttcattggttatttcatgggtgccgatgcagttgctttaaagccgcttggtgacattttcttaaacttaatgtttacgattgttgtacctctagtgttctttagcatcgcatcgtctattgctaatatggatggattaaaacgtttcggtaaaattatgtctagtatggctgggactttcttatttacaagtattttagctgctatttttatgattattgtcgtgaaagtattcccgccagcacaaggtgttgtactagaactaacacaacctgacaaagccggcaaagctgttagtgttgcagatcaaatcgtcggtattttaacagtatctgacttctcgaagttactatctcgtgaaaatatgttagctcttattttcttctctatcttaatggggattgcaacttcagcagttggcgaaaaaggaaagccatttgctacattcctacaagctggtgcagagatttcaatgaaggttgtatctttcattatgtactacgctccaatcggacttgctgcttacttcgcagcattagttggcgaattcggaccacaacttcttggaacttacttccgagcagcaatggtatactatcctgcttctctcatttatttctttgtattcttcacattctatgcataccttgcaggtcgcaaacaaggtgtacaagtattttggaagaacatggtctctcctacagttacatcacttgcaacttgtagtagtgccgcaagtattccagcaaacttagaagcaacaaagaaaatgggtatttcttcagacgttcgtgaaacagttgtccttcttggttctactcttcataaagatggctctgttttaggcggcgtattaaaaattgctttcttattcggtattttcaacatggaattcgaaggaccgaaaacattagcaatcgcacttgttgtttctctattagtaggaacagtaatgggcgctattccaggcggcggtatgattggtgaaatgttaatcgtttctttatatggcttcccgccagaagcattgccaattatcgcagcaatcagtacaatcattgatcctcctgcaacgatgttaaacgtaacagcagataacgcttgtgccgtaatgacagctcgccttgtagaaggtaagaactggatcaaaaacaaatttgcttaataaatagaaagaggatgctcgttttgagcatcctctttctttgttgttaatccattccgccacaaatttgttaaaaccttcacaaatattccacacctcttatccattctccgtactataatcatgtatggaaaaggagatggacacaatgacacaaagcgcaccagaatttaaagttttgcaaagcattgcatttctcgctgtcgttttgcaaagttctttattatatacaatgaatcaaggaaatgtcttacttgagcaatccctcattatgggcatgctatttaatcttgcaaaattctcagcaccagcattcatatttatcgttggatttcacttaattcgtcactatacaaagcaattagtatataaagaatatatttccgaaaaagcgatacacttactcattccttatttcttttggtctattctttacttattaacaacaaataatcttattacgttacaaagtggaataaaaagtttattactcggaacagccgctccccatctttggtacgttattatgatgttccaaattcacttattgttccctttactatgcacacttttttattggtttcaaaaacgaacagaaaataaaaaagacatatataaatatatgacctttttcgcttgcctatattttctattaatgtggttctcttctcactatatttttaatggagaaaaattaacaagttcaacaattttacattatacagatcgatcatttctattctactcattctatttcgttatgggcggcattgccgctgtagcactaaaaacttggcgtctattcgtcatgaaacatatcccgcttataacaatattatttttcatcttatttttattcatcaattatgagttgtttagtttttacggagcaaactctattcatttaactgtttctacctatttaaaaccatctatgtttttatatatcgtatgcgaaattatcatactgtatgtgttatctattatgatagtacagcgtcgtggtttcttatataaaacgttacgtttcattggtaattacacgtatggtgcttatttagctcatttattcttcttgcaactatgcacaaaacttctttccttattcacactgcaagaaaatactatattatatgccctattactatttgtgttaacggccattatctctatttcaacaatggtcatttgtagcacaataccatttcatacttggattacagggccttctcctacaacaaagatgaaatggacgaaggttgtattacgaaaaaatcataaaaaactattcaagccatatatttgatataataatacgcatataaaaagaaagcgagagacacctatgattaatcaagttggacaaattatgctatatgtaaataaccaagacgaaacagtacaattttggacagaaaaagtagggttccaaatcattgcggaagaaaataacggaaacggattccgctggattgaaattgcaccggcgaaagaagcaggaacaagcatcgtccttcacgataaagcgttaatcgcgaagatgcaacctgaactaaacctaaatacgccttcacttatgttcttctcaaatgacttagaccgtctatataaagatctttctgagaaaaatgtcacagttggacaggttgtagatttacctactggtagagcattcaactttgctgataatgaaaataattactttgcagtaatggaacgcaaataaaaaataagctatccgaaaaaatcggatagcttatttcattttaagaaacttgttctgcattcgtttctctatgctgtatatgactcgtgatccaagcaattccaccggcaacaacgagataacataacaatattaaaatttgcatttgtaattgcgaccaatctcctaaagaaataacatcttgtaatcctctaagagaatgagacattgggagaaactgtccaattttgctaagaacagctatgtttaattctcctgggaaagtacctccgctcgtcgctaattgcaggacaagaagcgttaccgctaagaactttccaacaagaccaaatactgttactagcataagaataaatgtcataaacgtaaaggaaataacaatacttgataaaacaaagagtggcacacttgcgacttctaatttcataacacctagcacaactacatctacgagtagcgcttgaatgagtccaattaaatataccaatcctagtttattaataaaatgtaccgttccgcttaccttcatgttttgtctgcggccaagaggtaaaatattcgatgccataattccgccaacataaaatgcaagtgataagaaatatggtgcaatgcctgaaccgtagttaggaacgtcagaaactgttgacttcactaactgaactggctctgagaacatcgtattgcgtgcatcatcattacgaacatccgctatcttctctgcgccctctcctaatttcgtagaaagttctttcgcaccatcatcaagtttaacaagtccatttgttaatttactagcaccgttattcagctccgttccaccactcgcaagctgatttacaccttcttgcagggatgtaaatccatttccccacttcataaatccatcagccaaattcgatgcaccatctgctatctttttcgttccagcagtagcttcatttaacttaaatccgaatgtattcatgccttcttcaatcttatgttgaccatcagttagcttcttcgcaccttgtgtcaattgttgttggctattatttaaagtacttgttgctttagctagtccattagacgtagcaacaattttttgaaaagcgggatcttgctgcacttctggatgatttttcacgtactcttctaattgttgtttcacactattggccgccccatccgcttttacttgcccttcagcaagcttctcacttccgctcacccattcatttgtaccagcacttaattcactaactcctgattgtaacgttttttcaccttgtgctaataactccataccactatgaagtgatgtcgctccttgactcagctcatttgctccccccgttaaggcagattggctagacgcaagcttgtcacttccttctttcaatttcgatgtcccgtcacttaaacgatcaataccattcgcaagctgattcgctccattttttgcatcggtcgttccttcatgtaacttctcagcaccattacttgcatcactcaacccttgtgccaaatcttgaaactttgaaaaaacaccttctgtatatgatttcgtaatactgtttgagatttttgttttcatattttcaacagctgtcgttccaatttgagccgctacaaagtttttacctggatttactttgtactgcaactttgctggctctggtttctcatccataagtgtacttacctttttagagaaatcttccggaatcgtaacaaccatataatatttatcttcttttaacccttcatccgcacttttttctgatacgaaatgaaaagccaattccttattctcttttaaatttttaacaaaatcgtctcctgcatgaattgttttttcatccatcgcagcacccttatctaaattcacaaccgcaacaggtaatttatctaattttccgtacggatcccaatatccagctaaaaagaatcctgaataaattaacggaacgattaataaaaaaattaaagcgatacgtccatgtttatggtgccacatcgctttccaatctttaaatataagtttaattcccttcatgaaacatactcctcttctaatttaacacccttcgaatggtttaacagatttactatacacgtcactttacatactgtataatacatctttaattattaattcattccttttggtctatagaaaggagactcgaaatggaactgctccagttaaaatactttcagacagttgcacgactagaacacatgacaaaggcagctgaagaattgcatatcgcgcaaccttcactcagcaaaacaattgctagactcgaaaaggatttaggagtccctttatttgatcgccaaggccgacagattactttaaattctttcggaaaagtatttttaaaacgagtagaacgtatttttcatgaattaagtgaaggagaacgagaaattaaagatttagccgaattacaacaaagctctattacactggccgtttctattccaagaatattaccagaactacttggctcttttttactagaacatcctaacgttcgattccaacaatttcttgcatccactccttctatgaaacgacaactagataatatagaaattgacttttgtatctcctctgtgccaattgaaggtgaggagattgtttgggaaccacttattacagaagaaattttcttagtcgtcccttcaggccatcgtttatcaggccgaaaaaatatccacctgcatgaagtaaaaaacgaaccgtttattagtatgaacactggctatggatttcgacacttaacggatgaattttgcaaagaagctggtttcactccgcatattgcttttgaagtagatgaaccgaccgtgattagcgacctcattaagcaaggtctcggcatcgcttttgttccaagtttaactttattaaaaaactctactttagcatcaagcaagttgcgtattattgaacccaattgtcagcgaaccatcggattaagttggtcaaaaaaacgctacttatcaaaaacagctcagcaattccgtgaattcgtgattgattacttctccaacattaggacgtaaaattatatcaacaaataaaagttgccaccctcatatggtggcaacttttattgttcactcttttttaattccatttcagctaaaagtggtagtacattatcaaaaatatgcgtattattattttcacctgttacatatccaccataatatctactaaatacgttatcatttcggaatgtggccatatgatcatacaattctttcgcaaactttttatcacctgtttgtagtacgtacaaaatcgttaatccgtatgcggctggcgattcataattcacagtttgttttcccgtttctaaattgtaacgaccgtatagctttccatcctcctggaatttcttctttataaattccaaataagcagttgatgaaagaccacctaaacttcgatgatatgcaacgtatgattggtcaataagattcacttctttatcgtacgtaaatgtaccatcttctttatactctttcgggaatgcccagccatgccttggatagtccgctaaaaattgaacgacttcctgatattgctgagcagaaactttgtcgtacttcttcatataggagaatgcacgtggatttatgtatgatgttgttacaaaattattttgtttccctgcatctgcatcataataatcaacataataattatcttttttattataacgaagtacagcatcacttaattgatcggcaaggtttttataacgctcttccttatacatttcataagcacgatataattgttctataatacgaagatcatctataagtgcatttgtagctgactgcctctctcccttttcagagagtttccataaaacgatatgattcttatatacgaaattatcttgaataacctttacttgctcatcaaataacgcctgatcatctttatcaagtgtatattgtaaccataatcccgctgattctgataaagcttcacgtccctttgcttcacccgtacctgccttagtatctactaaacggtacgtggcaagcgttccattgtcattcaccatatgtcttaaaataaaattttctgtacggtttccttgtaaagctgaccaaaatacaattccacctaaagcgatcaagaagataattccaatccctatatataaacgtttccgcaatcttttcacctccctagtaaggctaaccttaattttatcagaacatacataaatttaaaaagacaatccactagattgtctcccccatttctatccctcgtaaacctctttagaaggtttatatagcgattgtacaagccgatcatattcacgacgtgtaatctctttattatatagcttcaataataaatctctatgctcttttgaaaatgccatctttttaatgacttcaggatacataaaacaccctctccatttcacataaacttcttcttttcgaaaaaacagaacttatgttcgcataaaagattataaaagattcctgtaaaaaaaacaaacaaaacatgagaaactatttatttctttctattcaaaatattacaacattatattatcatattcactttttaaatacatatatatttttggtagtttttttgaataaatcttccaattcaatcagaaaataatggcaaaaaagaagaggagtttacatatggatacggtaacattagcaagagcattttttggttcttcattagcattccacattatttttgcaacacttggcgtcggactttcattgatgatttttataagcgaaatactctatcactggaagaaagactccgactatgccattatggcgaaaagatggacaaaggcgtttgctattcttctcggtgtagcaattccaactggaacaattgttggtgtgcaaatctcacttctttggcctggtttcgccaaaattgttgggcaagttatttctgttcccttccaaattgagattttcgccttctttttggaggctttattcatgtcgatttacgtatatgcagctgataaacttcctccatttatgagattaatctcgctatttttcgtcatgcttggtgccacggcatccgccgtgcttattacatcagcaaatacatggatgaatacaccagcaggcttttcaatgaatccagatggatctgtttttaacgttgatccgtggaaagctttctttaatccaagttttggcacaagtgcatttcatgtcgttattacggcttatgcaaccggtgcagctgtcattgcttctattgctggatttaaattattgaagaaaaatttaagtacacgtgaaattgcttatcataaaaaagggctgctattagggcttgtcgttacatttattacaggcgctacgatgtggctttcaggacatgaatcagcgattgccttacataaacactcacctgaaaaacttgcatctgctgaagctttatttgaaacgacatcacacgcaccgctatccattggcggagttgtggatcctaatacacttgaactaaactatgcacttgaaattccaaacatgcttagcttattagtgggactagaccctagcactgtcgtaaaaggactaaacgaattcccacaagaaacatggccaccattttatacacatacactattcaacttaatggtaggaactgctgcgtttacctttgctgttgcaacaattgcactcttatattggtatttcgtgtaccgaaaaaagggaacagaactaccgaagtggctactttggggggctgccgcatgcggaccaattatgatgctcggtattgaattcggatggattttcagttgtagcggtcgtcaaccatggacaatttatggtatgcaacgtaccgtcgatgcatctacacgcgctgatttcgtcggtcctttatttgttttgttcatcattttgtatattggactcgctattttaacagtcattgttctacggacattctttagaagacatccattaaagaatgatttacaacaccaaggaggcgattctcatgtatgaggaaagtattgcaatcatcatcttatgggcccttattttcgtatacagtatactagggtccattgattttggcgctggtttttggggcatggtatacgcaaaacatccgacgctcgctgctaaacttgcgaatcggtacttatcaccaacttgggaagtaacaaatacgtttcttgttttcgtcgttgtcgcatttctcggcttctttccgaaagcggcctttactcttgcgacagtaatgttcgtaccagttatgttaattttagtgctcattgcagtacgtagtacatttatggtatttgcttactccttgccaaaataccaataccttcttcgggttatttcaggtattactggtctattaattccagcactattaattaccgttttacccgttacagagggagcctatattacaatgtctgaaggaaaggaagtactcctatatggaaaacttctttctagcccagttatctactgttatatgctcttcggactaacttctgaactatttctctcctctctctttcttgctgatttttcgagagaacaaagttcagaagatacgtatagaatttatagaagaaatgctatcatccttggtcctgcaacgctcgttacggcaattattgccctcgttgtaatggatccagaaacacattgggttatgcaaggattaataaagcaattcccgtggtttacagtttctattgttttattcgttatcggatactcgtccctttggtggacaaacaaaaagtacaatacactaggataccctcgcattgccgttttagctgtcgtcgctcaatatgcatttgcaagctatgcttacggggtcgcgcatttaccgtatattatttatcctgacgtaactgtatttacaagctttacaacgaaagaaacgttctatgcactgctcattctatacgcaattgggattgcaattttattaccaggatttattttcttctggaacttattcttgaaggatcgtacttttttgaaggaaaaataatatagcattggagtctgttccaaaaggcattttaggatagactccttttgtcgtgttttgtcgataagtcgatatattttaaaaatcgctgatatattttgagttgcgccgatatatttcaataatcgctgatatattttaacttgcgccgatatatctcaataatcgctgatatattttaacttgcgccaatacatctcaataatcgcccatataaatttcatttactatcttactgccccaataatttatagactcctctcataatagttatttcactattcgtgacacctgtcctttagcatgaaaaacacatattcggttcatctcgttatacgtctagttcttcttattttttgctgaatatactaccaatataaacttgagacaagctacatctgttcaagggaaaatagaaaggtaggcaaaatatgagcattgaaatatggattactattattgtatttttcttaacgatgatcgttatcttttggcgaccccgcggcttaaatgaggcttggccagcagcaatcggagctggtatcatcataattactggacttgtatcaaaaccagacatcatggatattataagtaaaattggcggtgcctccataacaatattagcaactattgttatggcagttatattagaaagcttcggcttcttccattggtccgcagcgaaactagcaaatttagcaaagggttctgggcgccgcttatactggtatattcaattattatgttttcttatgactcttttatttaataacgacggtagtattttaattacaactccaattttaattcttcttctaaaaaaccttcaattaaaaccacatcaacaaattccttatttattaagtggtgctttaatcgctacggcatctagtgcaccaattggtgtaagtaatatcgtaaatttaatcgcattaaacatcgtccatatgactctttatatgcatactgctatgatgtttgtacctgcaacattaggcttattatttatgtcatggctcatgtatacagttttgaagaaaaaacttccgaaaaaattacctgtttcttcatatgatattgaagaaattttcttcacgaaaaacttccatccactaaaaggaaataattctgttgatacgaaacaaaaacggacaagattcatgttaaaagtattaggtttcgtcttcctgatgcgctgtcttctattcgttgcatccttcttatccatcccaattgaaatcgttgcagtacttggttcactcgttcttctcatttggagatggtactacttacgaacaaatcctgtcgacattttgaaaaagacaccgtggcacattttaattttcgccttctctatgtacgtcattatttacggactccacaacgcaggattaacagctgtacttgtacaatggctcgagccaattgtgaatcagcatctactctatgctagctttgcgatgggcggacttgtatccatcctctctaacgtcttcaataaccatcctgcccttatgattggtacaatcacattaacagaaatgggactagatccagtcacattaaaaactatctatcttgcaaacatcattggtagtgacatcggttcactattactaccaattggtacgctagcttcactcatttggatgtatattctgaaacaaaacaaaattaaagtaaaatggaaagactatttaagtgtatcccttatcgttatcccgctcacaacagtcgtcacactatttctcttattctactgggtacatctcttctttgccttataaacaacagaagccccatttgctaccgtcttagcaaatggggcttcttctataataaagttaggtactacagtgtgatcaatcaagtaaagaggtgtaacatgttattgatataaatgactaccagcttctttaaattcttctgctttctctttcattcctttttcaattgcttctttcgtttctaaatcattttcttttgcatattcacgaatatcatgtgaaattctcatactacaaaacttcggtccacacattgaacagaagtgagctgtctttgccccttctgcaggcaacgtttcatcatgatattccatcgcacgttcaggatctaaagataaattaaattgatcgcgccaacggaattcgaagcgtgcttttgaaagtgcatcatcacgctgatgagccgttttatgtcctttcgcaagatcagccgcatgcgctgcaattttgtacgtaataacacccgtgcgtacatcatctttgtttggcaaacctaaatgttctttcggcgttacataacaaagcatcgctgttccaaaccagccaatcatagcagctccaattgcagatgtaatatggtcataacctggtgcaatatctgtcgttagcggcccaagtgtgtaaaacggcgcgccctgacaaatatcaagctctttctccatattctctttaattaagtgcatcggtacgtgtccaggtccttcaatcataacttgcacatcatgtttccaagcaattttggttaattcaccaagtgtttcaagctcagaaaactgtgcttcgtcatttgcatctgcaattgaacctgggcgtaatccatctccaagagagaacgaaacatcatactgcttcataatttcacaaatctcttcaaaatgagtgtataggaagttttctttatgatggaataaacaccactgtgccataatcgaaccaccgcgcgaaacgatacctgtcgtacgctttgcagtaattggaatgtaacgaagtaatacaccagcgtgaattgtaaagtaatctacgccttgctccgcctgctcaattaacgtatcacgatatacttcccacgttaaatcttctgcaattccgtttactttttccagcgcttgatagatcggtacagttccaactggtacaggcgcgttacgaataatccactcacgcgtcgtatgaatatttttacctgtagataaatccataatcgtatccgcaccccagcgcgttgcccatgtcatcttctctacttcttctgcaatcgaagaagatacagctgagtttccgatattcgcgtttaccttcacatgaaaattacgcccgatgatcatcggttcagcttctggatgattaatattcgctggtaaaatagcgcggccttctgcgatttccttacgaacaaactccggctctaccccttcacgaatcgcaacgtattccatctcagacgtaataatgccattacgtgcatagtgcatttgcgtaacatttgcaccttgctttgctctaagtggctggcgatccatttgcgggaaaacaggtgtatgtttcgaagctactctcacaccgtcatcctctggtttcacttcacgcccttcgtatgcttctacatcaccacgccccataatccaagagtggcgcggcgttggaattcctttttccaactcgaccttatacgcaggatctgtataaggaccgctcgtatcatacacacggattggtggatttggaacgccattcgtttcgctttgttcaatctcacgcatcggcactttcataccttctcgtggtccatccacatatactttcttactccctggtaaactcgacttcaattcaatttgctcagctgaaacagattgtttcataaattttgttgcccccctgttcgtgacaaggacaagatatggccagcgcatgccaaaataaaaagagccaggtccataaaaaaataaggacctggctcataaagacatcattatgtaaagccgttaacttccctacgctggtacgagccagatcaggtccaaagggttaagaagttcacgcgcttctctctcagcctacgcatacgttaggcacccctagtttatcactgatttaattttcaatactttcccatcatacacgataatctgaaaaatgaaaagtttatttcttttgctctttacggaatcatccacgttaaataatacgcctgcacatacgtcataataccaacaataattacgaagaataagctatgcttcactgtaaaacggaacaaatccgattcttttccagcaagaccaaccgccgcacaagcgatcgcaatcgactgcggggaaatcattttccctgttacaccgcctgttgtatttgctgcaacgagaagcacttcagatacgccgacttgctgcgctgtaatggcttgtaaatttgagaacagtgcattcgcagacgtatcagaccctgttaggaatacgccaatccagcctaagaatggtgagaagaacgggaatagtccaccagttccggctaatgctaacgctaacgtggaagatagaccagaatagtttgcgataaatgcaaaccctagtacgaatccgatagatagaattggcatttttaattcgcttaacgtttctttaaatgtcactactgcatcttttacattcattttcaaaataaacatggaaatgatacaagcaattaaaatcgctgttccagttgccgataatacatcaaacttcaaaattgcctcgtaaggcattggtttatttacaattggctctgctttcattactaaattatgcagacctggaatttcaaacttaaatacaagactttctaaagcccctcctgaagcaaatagtgccttaaagaaactttggctccaaatgactaccataaccgttaatacgataaatggagaccatgctttcactacttttccaaacgttaatttcggcatcgatgccgctgtcgttgttactgctacttcactatttgctcgcccggattgataaatttctttcggctgccaaacttttaagaacagcgctaaactaattaaacttacaagtgctgatgtaatatccggaagttctggccctaaaaatgtcgctgtaatgaactgcgtaatcgcaaatgaactacccgctacaagtaacgcaggccacgtttgtcgtatccctttaaatccatccattaaaaatacgataaagaatggaacaaataatgataggaacggtaattgatgcccagccatttgtccaattttatgtggatcaatacctgttacttgtccagcaactgtaatcggaattcccatcgctccgaacgccactggtgcagtatttgcaattaaacaaagacctgctgcgtataaaggatttaacccaagacccgcaagaagtgctgctgtaatcgctactggtgccccaaatcctgccgctccttctaaaaatgctccaaatgaaaatccaattaaaataacgagtagacgatgatcattcgtaatcgataataccgatgcacgaatcacatcgaattgacctgtttttacagaaattttatataaaaataccgacataatgataatccaagcaattggccataatccgtacaagaaaccatatccggtcgctgccattgccatcgtgaacggcattttataagcgaataacgctactaaaactgtaagtacaactgtaataaatcctgccacataccctttcatgcggaaaactgctaaagctaagaaaaaaaagataatcggaataagtgcgaccgctgccgaaatccaaatgtttccgaatggatcataaacttgtgtccatgtgttcattgttctctccgatacgataaacttaactaaatctatacaattcaatcaaatttacacgagttagtgcttcatcgtgttctcgcaaccccaaagggacgaggggtataacactccacacgaggcagtatcgttacctcctattatcaagcatttattttacccatcttgataaatttatcgcagcattcaaatctctatcgtgatggctattgcatgaaacacaacaccactcacgtatttttatactccattgtccttctggttgaactgaatggtcgtattttactccgcaacatgaacaaatcttgcttgaggcgaaccatttatcagctttttcatacgcaatgccgtacttctcgcacttgtatgacaaacattgaaagaagaagtttaatttttgaaaggaaagtgccttcgatagttttttgttttttaacaggtttgaaatagataagtcttccacaacaatcctcattggtttggttttcaccaatttagctgttgcttgatggatatggttatttcggatattcataattttcctagataaccgcaggtgctcagctttcgctttttcatatccggcagactgaattttcacaccttttttaaatctcctagacatatctctttgcgctgactttttccttttcaaaagttttttaaccttagcatctttgtttatatttcgttctttcataccattagaagctacaaaaagttcttttaaaccaacatccacaccaatcgactcattcgttagttcttgtgattcaaagtcttcttggaaccctacactaatccaccagtgacgaccatcaaaggtaactcgtggattggatggttttttatttcttggtagttgttggcttgttttcacttctccaatagactgaatatgaacgactttctttcctataaccagtctttcataattggcataaaatccttggattaaatcttttttggatttataagaagtgtgataaccatttttgtactttttgaacgaatgttttctcgccgtatcaaaatcttttgaagcctgtttgggaacttgtgcattaatgtcttttaaccactcatatctctttcgcttcttgatctttgtaaatcgtttctgtaaagctaactgtgaaacagattttccaaatagcttatagtatctatcactcattcttttacaatagttataagcaaatcttgcagcaccagcatggtttctaagcacttgttcttgctcaggcgttggaatcagtctgactttcttcgccaatatcatcagaatgtaactcctttaatgaaagatttgttcttctgaatcgtagcgtgttccaccagcattctcctgagactaccaggatacaaacctgttaattccgatacttgactaactcgtgaaaatttcattattattcttagctcattaaatccaatgtagcacatacgttctatggattcaatgaggtttgatagatttaattaaatttatctcgttcaactaagggcgcaattccttagccagttctcttatgaacttctcatattttcacatgagcgcagactatatgtttatctctttagagatagaggatttttccaccaccataggcttgtgatgtactctcgtcagttatacgagatagtcgttgaacgttcatcttatccattttgacttagatgattcgaggcggaagacccattgttctagtgtttaggatttaaccttgcacgatctgattgattttttctgctttcgcgacattcacgctcaccatttctggtcacgttgtagttcaatcagctttagggattgcccgcagttaaccctcactactagccaatcacttgactagcagggcttactgatatatttaattaactttggttataattggttaaataaatcgtaacagttagttacccccctaaagaatccccttttaaatagaataacctcaccaatagactatcaggtcatcatacctttaagcctaaaataaaaaaacgttcaagaaaacgttttcaacaactttcatttatactgtaccataacaatttctattaaaaaagatttttttgaaaattttattatttaacagaaaatcttacaaaatcgtcacgttcttgtaatgttcatcgataggaagtttgccaaaattattgcataataatagtataacaacagaaattattcatgaggtgatatatatgaacggaaataaaatattagctgcgttatcatactttagtgtactatttgcccctatcttattccctattatcgtttggattgtgggagacgctgaaacaaaaccacatgcaaaacgtgctctatggacacacatcattccaagtatcgctacattcattggcgtaactattctaggaattatgggccttggatctgatcaaccagacgtaacacttggaattggatcaatgattgtcttagctatttgcggaatcatcagcttatactacttcatctggaacattgtaaaaggcattaaagtgctgaaagcttaattttaaacaaatgtttgtttaaaaagggccccttgcaatttgcaaggggcccttttcctaattcgttcactttatcttctgcgtttcttcttttttctcatcattttctttcggcgcgtattcactttatccgctataatgtggagcgtacttgccacaacaattcccattaagaacgttacaatttcaacctcatgcttcttcgcaatttctattaaattaccatccagtgcgactacatttaatagtaataaaaatggagaaaaaacgattaacatgtacgcaatacgaatcacatcaccaagtataatcgtatgcgtaaagaaagatcgatgcggcattactttcttataaggataccaaaatatacgtaagaaaccccatttgttataagcattactgtacgtatctaaatctggtgttaaaaatgaagtacctactaaaaaaccaattgcaaaagttaataaaaaatcaaaatttgttaatccatacgaaaagagcaaaaacaaaacaaccggaagggatattaagtttattttcgtatgcgttcttcctgatggcataatgcacttcctcgcttacgttcgtcctgtcaccttatgacagatttcacctattgacctaatttctgatcgataaatgttgtgtctatatccgaactaaaccattctgccaacttcactcgtgccttatctttcacatcttcattgacgtataacgacacctgtattagtgcggccgttaacgcccctaaatcatccgtatagccaattccagcaatgaaatctggaatcgcatcaatcggtgcaataaaataagcaagtgctccaattacaataattttcactcgttttggaacatcgggtctttgcaaaacgtaaaacagtaataaacttgcataaatgaccgattgccctgcttgctttgcaacatgttttactttcttccaaaacgcttcaactgaaaatttttgtttcatgtaaaaagcctccctatttttaaaaagaaataagctacaatatgttatcagtaaaagtttatggaaattacacaaaacctatcaatgaacttttattgtaacaaacaaaccaaaaaagaacaagtgttcgttaatttttacactatttccttcatataatagatttctagataacccttacccatcttcatttcttatttctcaacaaagaaaattttcacttccacttaacattctgctctacctttgttatattttctagttgacggacatataaacgaatgttaaagttttctctggtagtgacaaatcttatacaaaaaatgtaaaatgttatagtgtttctcagaaatgaattttgttgtataatacagaaatgacgttatgcttatgagcaacaaaagaaaccaaaagggtatgcatagttatagtcgtatatgggtgaatatagaacctttaattatggccaagaaaactatgtattttttattttagcatttttcgctccaaaatcgaccaagcctgatagagaaagggtggaaatgaatgaaagaaaccttgaaatcacaatttcaaaatgtgcgttttactgtattcgtagctttagccttatggctgaaaacttaccttattacacgcacaagctttgacttaaaacttgaatctttcatgcaagaattcattttattccttagcccattagcagcatcattactgcttgttggtcttgcattatttgcaaaagggaaaaaacgtaactatatagcacttggaattaattttgtcttaacaatcgttcttgttggtaacgtaatgttctacggattctacaatgacttcgttacattaccggtgctaggacaaacatctaacttcggaagtttaggttctagtgtgaaagaattatttaactacaaaattattcttgcatttgcagacattatcattttcttcgttctattaaagaaaatgaaaaactttgcacctacagagcgtgtagcacgcccgatgcgttccctatacttcgtatcaacagttgctattttcttcgcaaacttaggacttgcagaagctgaacgcccagaactattaacacgttcattcgaccgcgttatgcttgttaaaaacttaggattatatgtacaccaagtatacgatcttggcttacaagcaaaatcaagttcacaaaaagcattcgctgacggtagtaaattacaagaaacagaaaactatgtgaaaacaacacaaagtaaaccagatccaaatatgttcggtactgcaaaagggaaaaacgtaattgttgtctctcttgagtcgttacaaacattcttaattggcgcaacagttaacggacaagaagttacaccattcttaaaccaatttacgaaagaaagttattactttgataacttcttccatcaaactgggcaaggtaaaacatctgatgctgaattcctagtagatacttctttatatccactagaccgcggtgctgtattcttcacacacggtaacaatgaatatacagcaactccagaaattttacgtcagcaaggatactacactgcagtattccatgcaaacaacgcaacattctggaaccgtaacattatgtatccggcacttggttatgatcgttactacaacgagcttgactacaagattacaccggaaacaaaactaaactggggattaaaagatatcgagtacttcgatcaatctgttgatatgttaaaacaagtgaagcaaccattctatactcgcttccttactttaacgaatcattacccattcacttacgatgataatacgaaattaatcgacgaatacaattctggtgatggcgtatttgaccgttacatggtaactgctcgttacttagacgaagcaatgaaacactttattgagcgtctaaaagcagaaggtatttacgacaactcagtaatcgtattctacggtgaccactacggtatttctgaaaaccataaccgtgcaatggcacagttcttaggaaaagaagaaatcactgcatttgaccatatgaacttacaaaaaacaccgatgtttattcacgttccaggtcaaaaagaaggtaaaacaatttcaaaaccaactggtgaaattgacattaaaccaactattctaaacttacttggtgtagattctacaaatgacgttcgattcggtcatgatgtattctcacctgataataaaggattcgttgttcttcgtgacggtagcttcgttacagataaatacatgtacacaaacagtacattctatgaccgtgctactggcgaagttgtacaattaccgaaagaagaatcccagccactaattgatcgtgcccaaaatgaattgaacatgtctgataaaatcattgaaggtgacttacttcgcttctctgaaagtaataagatcaaaactggtgaagtaaaaacagttattaaagaagaaaagaagagcgctgagtaatctcagcctctttttttattttcttccatacaactacttatattcattaactttaaaattacataacctttaccaaatattcacatagtgttaatgaagaatctctataataaaatatgtaaacgaggttctacatatttcttatctctcatctttcgtaagatcccttaaagaaatgtgtaaatcttttgtttctactttcttataattgtctttcaacttgttttgtttccatacacaaagcattcaacgagacaatgtccctatgaaagatagctaccctccttgtgcagcattccataagaatgttgcttttttttatttaaaagcaggattctcatttcttattttcgaatttgtatatacaaaatgctgtaaagtgaaactttaatcagccctcatcaatcgggcatttacgggcagtgattcgcccacttcacttctttgctctaccggaatttgtaagtaggggctttactgccgttaatgcggggtagatcatccttatttctctatgatttacaaatacatatatggtcatatgtagagaattgctcacataaaaattactatagtgatttttatctcgcatgaatgaaagtttcacgttacttacgtacttacgaaaggatgggacggaaattggcatacgaaaaatttgtactttggaatgatgaagttattgatacaacaaaacaacaaacgtacatagaacttgaagaaagaggttcgcagttcggagatggtgtctatgaggttattcgcctatataaagggaactttcatttattagatccgcacataacgagattatatcgatccatggaagaagtagaattatcgctccctttctcaaaagctgagctcatcactttactttacaaattaattgaacgaaaccatttccacgaagatggcaccatttatttgcaagtatctcgtggtgtacaagctcgcacacatgtattttcatatgacaaccctccgacaatttatgcctatattacaaaaaaagaacgaccggctttatggattgaatatggtatacgcgctatatcagaacccgatactcgatggctacgctgtgacattaaatcattaaatttattaccaaacgtactagctgctacgaaagctgaacggaaaggctgtaaagaggcacttctcgtaaggaacggtattgtaacggaaggaagccattccaacttctttttaattaaaaacggaacgctttacacacatccagccaatcaccttattttaaatggcattattcgtcaatatgtcctttctttagcgaatactcttcacattcctgtgcaggaagaacttttcagcgttcgtgacgtttatcaagcagatgaatgcttttttacaggcacaacgattgaaattttaccaatgacccaccttgatgggaccgcgattcaagatgggcaagttgggcctatcaccaaaaaactgcaaaaatcttttaatcaaatcttattacaatccaatatggcatcttcttaaacacgaataatttctgtcctttcatattcaatatatgcatttaaatggaaatcaaggtgtaattttatgccttgatttttttcttgtaatctttttgtcatattcagattcctatataagtcttgacagtaatcgacatgctctttagaatttttaacagttggtaaatatttcttcactacattacagacagaaaggaatcgacaaattatgaaaaagtatcttgccggtcttgcggcagtgtctgtagcaggaggagcagcacctacacttgatagtgttcaagctgcacctgaacaaaatacacaaaaagctgctacaactgtccaagcttctgcatcaaacagctcatcttataaggtaaacgcgagcgtattacatgttcgtgcgggatcaaacacttctcacgacatcatctcacgcgtttataacggtcaatcactaaacgtgattggcgaagaaaacggttggttcaaaattaacattaatggacaaacaggctttgttagtggcgaatttgtatcaaaaagtggcgcagcaaacaacaatgtaagtacaggtggaaacaataaagttaccgctgatgtattacgtgtacgtacagctcctaacacatctagttctgtttctgggcgtgtatatgaaggacaaacattaaacgtaattggacaagaaaatggttgggtgaaaattaaccataatggacaagtaggttatgtaagtggcgaattcgtatctggcgtttcttctaatgcaggttcttcaaacaacaatacgaataataacaaccaagaagtaaaaccagcaagcggaaactatacagtaaatgtatcttcccttcgcgttcgtacaggtcctagcacttctcacacaactgtaggttctgttacaaaaggacaagtagtacaagttgttggagaagttcaagattggttcaaaatcaattacgcaggacaaactgcttatataagcaaagactatgtaacaaaaggcggttctaacgaaaacgttacagaaggcaacaaacaagagcaaaacaataataatggaactattcaaactggcggttcttacgtagttaacgctacatctttacgtgttcgtacaggccctgccgcttaccatagtgtaattggtggcgttttaaacggcaccacattaaacgtagttggatctgaaaacggttggtttaaagtaaattaccaaggaaaaacaggctttgttagtagcgaatttgtaaaattcgttaaaggtggcactactactcctgagcaaccaaaacaacctgaacaacctaaccaaggtgcaattggcgattactacattaatgcttctgcactaaatgtacgtagcggcgaaggtacaaattatagaatcataggcgcacttccacaaggtcagaaggttcaagtaatctctgaaaactctggatggagcaaaattaactacaacgggcaaactggttatatcggaacacgttacctatctaaaacaccagttggaggcgcagtagataataagcctaacaataaccaaaataacaatcaaaacaataacaacaataataatacaggcaacaatagcggcgacagttcttccgtacttgcatatgcaaaatcaatgcaaggtgtaccgtacgtttggggcggaacttctgctaacggcgtagactgcagtggctacatctaccacgtatttaagaaatttggtcataacattagccgccaaagtgttgcaggatattggagtagcctaccacaaacttcaagtccacaacctggtgacttaatttatttccaaaacacttataaatctggtccttctcacatgggtatttaccttgggggcggatcatttatccaagctggagataaaggtgtagcaatcgcttcattaagtaactcttattggaagagccacttcttaggatacacgaaagcaccttaattaatagtttcaaagccttctagtttactagaaggcttttttgtacgatttcaacacattactccctttcccctagcttccctctataaaaataatgtatccattcttccatttcatacactttattctacaaaaacaatgcataacgttatcataatgtatatattttcataaaaaacataacctatttcatgtctatttattttatatgtgtttttttgaagaattttctttttatttaaacttttcattagacgtttgacctccgatgtccattatgataagttactaaagatgttatattcgcaaacgtatagacaactggtttatacactgtttttactatgaggaaggagcatacactgcatgaatcttttatggggaattggcggcgtgattggagtattagcaattgcttttctactatcttccaaccgcaaagctattaattggcgcacaattttaatcgcgctagcattacaaatgtcattttcatttatcgtattacgatgggacgctggtaaagcaggtttaaaacacgctgctgacggtgttcaaggattaattaatttttcttacgagggaattaagttcgttaccggggatttagtcaacgcaaagggaccttggggatttgtattctttattcaagcactacttccaatcgtatttattagttcattagtagcaatcttatattatttcggtattatgcagaaatttgttagcatcgttggtggtgcattaagtaaacttcttggaacttctaaagcagaaagcctaaactcagtaacgactgtatttttaggacaaactgaagctccaattttaattaaaccttacttagcacgcttaacaaatagtgaattcttcactattatggtaagcggtatgacagctgttgctggatccgttcttgtcggttatgcagcaatgggtattccgttagagcacttattagcagctgcaattatggcggctccatcgagcttattaattgcgaaactaatcatgccagagacagaaaaagtagataataacgttgaactttctacagaacgtgaagacgcaaatgttattgatgcagctgcacgcggcgcatctgaaggtatgcaacttgttattaacgtagcagcaatgttaatggctttcatcgcattaatcgctttattaaatgggctattaggattagttgggtctttattccatattaaacttagccttgatttaatcttcggctacttactatcaccattcgcaatcttaatcggggtttctccaggtgaagctgtacaagcagcaagctttattggtcaaaaacttgcaatcaacgaattcgttgcatacgcaaacttaggaccacacatggcagatttctctgacaagacaaatctaattttaacattcgcaatctgtggattcgcaaacttctcttctatcgcaattcaattaggtgtaacaggaacgctagctcctactcgccgtaaacaaattgcacaattagggattaaagcagttatcgctggtacattagcgaacttcttaaatgcagcagttgcaggtatgatgttcctataaacttatataaagtcttctctttctacaagaggagacttttttcatgcaatccaaacgtcttttatgcatctattaatcactttatcccaaatataagaacattatgatacaataatctttaagtctttttatttttccgatgaaaatagagatactacttgttgttgcccttcaaaagagtgtaacgacatggtcaatttcttaataattgcgcatactacaagtatctattgatgaaatagctttaaggaggaaagttttgtgaaagataaattctataaaatcctctctatgtggattttacaaattgtattttattttactactgtacatgtgacgaaatatgagcatgcgctcatttttacaataatatacgtaatcgtaaatgtactattcttatttttagctgacaaaacagcatttgttttcttcatactaggaaccattatttccgtattttatttgttctatcaagcatggcttcacttatggagtacatcagatcaatggcaatatatgattatccacttcctgatggcagctaacttcttcattgtatatataacaactcacctattgaaaaaagtgattcatgaaaataaaactttaactgagcgtgtgagaacattagaacaatatattggagaatcaaaattactaacaagacaagaattcgagagacgccaagcgttattaacgactgcaatgaatcgtcgtaatgaaacaggcgttatcatttactttgatttcacttcctttagtaaatatacgaaggaaagtgttatgaaccgtgtagcttctttattagttgaaacagtaaggaatgattttgaccttgctgctaaatatgataataatacgctagttattttattacaaaacacaaatgaagctggtgctgacattgtaatgaaccgcctaaagccaaaaatggagcaatggcttgctgctgaagcaatccgagatataaaaatttcacgcgagcaaattggaaacaaaggacaaaccctgttatgatgactctcgttatacttcttttattccttctgttttgcgtactcgttttttggattagtatcacattttcaattaaatatgtacttatttttacggcttttctattctctggcttactcgtttactactctttattaacaatcgcgggcctaattcaccgaaatagtaaacgaaaagatcgtacgctagaacattatccgagcgtcgatattttcatacctgcccataatgaaggtgtcgttattaaagatactttagaggcgatggcgaagattgaatatccaggaaagctaactatttatttattaaatgataactctcaagatgaaacacctgaaatcggcgatgatttcgacaaagcttatgctcatattcgccacattcgtgttcctcccggtgaaccgaagggtaaatcacgtgtattaaactacgggcttagtatttcagatggtgaatacttctgtgtttacgatgcagataaccagcctgaaccacacgcactgcgaatgcttgtagagcacgctgaaacaactgaagatgctgttggagctgttggacacgttcgtacagtaaacgaaaaaagaaactggttgacgcgaatgatttcgctagaatttcaaatcttccagctccttatgcaatctggacgctggttactattccaaacaggctcactgacaggaacaaatatgcttcttcgtcgctccgcactagaagagcttggtggctatgacccttatgcaattgcagaagatgctgaattaacattacgaattacacaaaaaggttatctcttaccaatcgtcccagaatcagttacttgggaacaagaaccagagcatttaaaaattcttattaaacagcgtacacgttggctccaagggaatttatatattttagaaaaaatgttctcatcactaagtttctttaaaggaaagctgcttgttcattccttacaacaagttctagtgtatgttgtattttggctattcctaatcatttcgaacgtttggtttgtaattgggctgctcgggatattccaaattcaatatagcattccgctactatttatgtggtatgtcgcatatattacatatgtttctcaattatttagtgcccagagtgtcgaacgaacctttacaccgactaatatttttattagcgttattatgtactttacgtacgcacagctctttacgtacttatttattcgtagcttaatcttatacttacgtgcaaagagcaagaaacaagtcattggctgggataaaacagttcgattcaaaaaagataaataataaaaataagcacagagcgccgtatgctctgtgcttatttattgccgtataaattatatatcagacaataccccttagctgaaagtaatttcacgtccatcccccaacgaacgatcgaccttcatttatatacgaaaaagtgattgctatttttgtagaaccaattgcttctcttgctgttctttgcgcgtttcagtcttaggttccgtgctttcttggacactacgatgtgccacacgtttcaaacaaatatgcttccactttctttcgtaacgtttcattattctagatgtcccccttgaatgcgctttaaaactatttgaaatcgcttacaggaaataatatagcacatatatataaacgtgacaacacatttccgacaattttttgtcaaaaatatgaatagaattcgtaagggatcgaatattgtcgaaacctatcgttttttcttcgtataaaaggcatactacttatgtggtaaagtattttatttcccctacccgcattttaaattccttctatataaagtgaaactttcattagccatcaccaatggggcttttacaagcagctcgatttatttgcttttgctgaattttgaggtggggttcttactgctcagcaaatagagggataaaaaaagagctgatatgaaatcagctcttttccttctattattaatgacgcttcatacgtccttctttttgtaactctttaaataatgctgccatcataaagaaaataacaaagacgaacgggaacgctgcaataatagctgccgtttgtaatgcttctaatccgccaatatataatagcgtagaagctatcgcggctagaacgataccccaaatcattttaatacgatttggtgggtttaaactaccatgtgtcgttaacatccctaaaacgaatgttgcagagtctgcagatgtaataaagaatgttgcaataagtaaaatacctaaaactgataaagctgatccaaagctgcccatctgatcgaacatagcgaataatcctacttctgttcccatctctttcactttttcgaagatatgtgcatcaccaaacagctccatatgaatacctgttccgccgaaaacagagaaccaaagtgcaccaattacggtcggcacaagtaacacaccgattacaaattcacgaattgtacgacctcgtgaaacacgagcaataaacgtacctacgaatggtgaccatgcaatccaccatgcccaatagaaaattgtccacgattgaatccattggttcccaccttcgtctaatggacttaaacggaagctcatgcttggtaattcctgaatataagaaccgattgttgaagtgaagtaattcataataaagtttgttggacccgcaaataatacaataatcataagtgcaaacgcaaaaataatgttcgtattacttaaatatttaattcccttatccagacctgtttgcgcagataacataaataatactgttacgattgcaataataactaactgtgtcgttaatgaatttgggatagatgttaaatagctaacaccacctgcaatttgttttgcaccgagacctaatgacgttgcaacaccgaacacagttgcaaaaacagctaacacatcaaatgaatgagcaatacgcccgtgttccccgcccttaaataacggacctactgtcgcactaatcgtacttgcttttccttttctaaaggtaaagtaagcaatacataacgctacaaacgcatatagtccccaaggatgtaatccccaatggaaaaatgaaaaacgcagtgcaagacgcgcactttcctcagttgcaccttctccaaacggaggtgcgtataaatggtttaatggttcagcaacgccccagaaaactaagccgatacccataccagcactaaatagcatagcaaaccatgtcatataactataatcaggttcgtcatcatctttacctaaacgaatagaaccgtatttcgaaacaattaaaaagatagacacacctaaaataatagaaacggaaataatataaaaccagccgaacttactaactaatgcagtttgaattgcggttgttacatttcctaaactaccttttccaataatagattcgggaataatcccccaaattgtaaatgcaatacataatgttaatgaaacgatgaatgtttttgtcagtttcctcatcaaatcccccttcgtaggtttcgcttttgtaaataacataaattccgatatgtaaaatcggatagaaaactataattttgcggtgattttcttactttcaccttcaccaattcgaattcttatggacagccttacctttcgtataaccttttcactctgcaagagctacaagctagaaatactgctgtcaaattgtgtgagaaaaacgcggataggaatgtattttcctaaaaaaggatgtgttacatatgtaaaaaagggcaaatttcttccttgcaaccctttcgttttgtaacaattatgcggttttttttctagtatatagcacgtgtttatagcttcacaaacaaaatgtttatgtttatataactatattacccataaaacggtaaaatactcaaggaatgtaatcgtttagtaaacattatgtaacattactgtaatatttttatttacgtcgaaaaaaacatgttgtattaaatattttgaatataactagaaacctatgattcatatagaatgaaaaacgctttcttatattttttgttatattacaggatattaacgacttattacgaatggtttgtaattgtgtgttttccccaaatccgaaaaaatctgttgctataatgaggacacgaaaacaaacgcaatggaggctatcatgaaaaaattaattggtatagcaacagcagcagtttttggtcttgggattttcacatcatctgctaatgcagaaactgttgtaacaacagatgtactaaacgtacgcgaaaaccctactacggaatcaaaagttgtcggtaaattactaaacggtaataaaatagatgtacaaaatacagagaacggatggtcaaaagttactttagacggtaaagacgcattcgtaagtgcagagttcacaaaaagcatctactacgtaacagctaacgtattaaacgtacgtgctgaagcgaacacaaactcagaggttcttggaaagttgaagaaagacgatgtaatcgaaacaacgaaccaagtacaaaatgagtggttacaatttgaatataacgggaaaacagcttatgttcatgttcctttcttaacaggtacagcacctgtaattgagaaacaagaaacaacggctcctgctaaagctgaagcaccagctaaggctcaaacacctgtagcacaagcaaaaccagctgctaagcctgctgtgaaagctgctgaaactagcgaaccatctggtggtcgtgagttaacagttgtagctacagcatatacagctcacccgagcgaaaacggtggcacatatggcggccgtgtattaactgcaatgggtcatgatttaactgcgaatccaaacatgaaaatgatcgctgttgacccgaaagtaatcccattaggatctaaagtatgggtagaaggttacggagaagctatcgctggagatactggtggtgcaattaaaggtaaccgtatcgatatcttacttggatcagatagcgctgctcaaaaatggggacgcaaaactgttaaagtgaaaattttaaaataaccaataactgctaaattacaagccggttctctttattgagagctggcttgtatttatttataatacatataaggaggctatgcccatgaatgtacaagcaaaagtagactggattggtacgccaaaaccgtacatatataaagatgaagtgacatataacgctacttctattgatttttcactcgctggcgatgataaacgctataagttaattgtgctcaagtctgaaaacaatacacattacaaaattgtgcaatatggaataaaaccaggctctcaaaagccatttcctatcgacattccatttgaacaaaacatgttaccaattatagagcaaatattacatgatccatatgtacaagaaatattaaaggaaacacactcataattgtaaaaaaatatatcaacgatttttcaattatatctatcataacttacgatatatcaacggttggacacgaaatatcgatttagctacaaaaaagaagctgttcaaatattgaacagcttctctcatattaacgagttggaccagatacatcttctgatttcaacgtattatttgcaccaagagaatgatacaacatctttccatttccattcacagttacaatatgttcgctattaaaacttttgaacttcacagatccatcaccgtaacgaatatgatactcttcatatgtcgttactttatatttcgtatcactttgacgctctacattacgaacttccatcgttaataagtcttctgtaattccttttttgtgtaaatactgtatataatcacggtcttccttatacgatttcccactcttatcataattcttttcaattaaactaaaatcatttaatgaaattgcacgtacgttatcataaatatgatttcttacaaattcgcccactgctgaacttgatgtttctttcgggaattttaagtaatacgtgctttggtctccaattttaacactttcagatttcatcacaccaaaatcagtagttttctctaaatgtacttctactgtttcatctgtggatacagggccaagcttataacttccataatttaattttccacgttttttcccattcacaaatacagttgcatcactttcatcagaagaaatgcttacatacttaccttcaagcgataaatccactttcaccttctcgctctgttcatccgctaaatctacttctttctctgtttctaattcagtcagttctgtcttcgccgttgcctttacaacatatgtacctgggaagtatggccccaactctttcgaagttttatcactagaaagctctgtttcttttttgttattcacatgtatttctgcattttttgcagttgtactaatgctcatataataagatttcatgctgaacttatactttggatataagaaccactcttttccctcttctactatttccccgtccttaaatgaagatttatctttagttaacttttgatctactgtctctttctgtaaataagacagtaattgtttgttgtaagaaggattctcttttaaataacgcatgtacgctttaatatcctctgtcttaatctttaagcttgaatcattcgcttttacaaactcatcaattgcattaatatctttcttttggaatgcttcaatcattacatttacttgcttttcttttgaaaacttatatgctccaaatttatatgccccaaataataatgcagcaataacagcaaaaccaatgatcaaaaataaatttttcttacttttcactgattttgtctcgctttgtaattctgtatatgaagcagcagtgttatcaacgattacttctactttactcccacactcaggacaaaagttcaaatggtctgcaacattctttttacatgttccacaaaacttcaacgtgctctcctcctattttttagctaatttcattccagcaaatgccgctacatatgtcacaatcaagctaaacaaagttaaatatataaatgaattttgcatagataataccgttccacttgttccaaataaacctgttaccgttcctgaaacattaatttggaacttagaaatcatattcattacaatcatcataattgtgtaagaaccactacataccgctaatgtaatatatatattggcggtcggtaatttagctaactttcttcccgctctaaacataaagaacaatggaataataagcagtaataaaccataatggaatacattattcactttatcaaattctgcaaggctttcctcatttgctccttttgaaatcaatatctccctaagctctacgccatttacagagacgcctgatataaatgaaaacgatagcgtgctctcatatgtatttgatttcttaccaattctagtaaattctttactaagtgctggacttgatacttctaacggcgcaaaatgagccatactccataattgaggtgttaactctaatgctaataatgtactttcagattttaaaattgttatttcttttaatggttcaataccgtcttccttacttactaacgccataatacaaaccgctatcgctgttactaatagtccttttatcatagctgaaacaccgtaatacacagacgctccatatggcattaactcttgaaatgctactgccatattgtttttgcttgtatgagcaataaatcctaataaggtaaataatgtcccacatacaacaccactcaataaactcttaatcgctgaatagccaaccgtaatcttacctgcttctgagaatggaattgcaaaagattgtgatgctataaaacttataatgaataaaaagacgccataaataataccaactgttgctgccataaagatttgatctttaatcgttttcgcaacatgctgtttccctaaccaaattcctgtaccagcgaaaataataaatggaatgattaataataatgtaaatggagtatgccaagataaagaaaatatcaatccactatcatcgttagctgtaaaaccaagtaaatggtaacttaacatcgtagaagttgcactcgaataaaaacttggcaacatttctaattctttcgcaaatttgctaaacatctcacttaacatagaagcaaataataaactaccaatccaaccagcaattaacatgagaatacttgcaacagccccaccaataaaacctttttgtaacacggctttatctgctttaaattcaactttaggagcaccatccattgtaggcaattttacagattgttcttttttcttcacaacagataaagaatacccgcacttttgacaatataaatttttttgagcattttcactgccacaacctttgcagtattttgcagtatctttttctaatgttactgcatctatagctcctgcaatctccatactaccttcatttgggcaataatttacttcttcaccatgttgttttccacatgtgcgacaatacatttaattcactccccactttgcttaattccacaaactggacagtaagtagagtttttatcgatatgctcattacatgaaatacaatttaccgtttcaccttcattttctaccgctaacatcgggttagattttccacacgaaccacaaaacttatcatttattgataaaggtccaccacattcacatgtagctttttcaccttgttgtttttgcaattcaacaatgcgctttcttgcttgataaatagctacatcaaattcttgaactggagcaatcatttcttttaagctcgcttcatttactccacttcctcttaattgaacatacacttgctgcccaacctctaatagaacctctgcttttttctgcatttgcacttgcattccctttttcaattgagcaatttcttgtgcaacttgcaacttcattttcccttgttctattccttcttgtaacttattcattccactacctaacttcgtctgtaaatctgacaaattacttctcctcctatacgtatatattcatatatgaaattaacattttatatattaccatgattttcaagttatgtaatccaaatttcattttttctgttttgagcattttttgtttataatggtaaaggaaagaaatatgtgtacggaggaatattatgctgcaacactcaattacgaaagatgaaattatgatgattgcgaatgagttcgttcaaggactagatccacagcaaacagctgatcaggaacatgtcgctacagctcggcacctatatcgtagtggtgttgtctacaacgttgactttgatggttatacactgtcaggaactgtagatgcggaaggcaacgtatatagcgttcatattccgattcgtaatgtcgctgaaagttattgtgattgcttcgcaccaacacaatgtgagcatatgctcgctgtattactatctgcagcgtctagtttcgggcaagtaggagatgtattaactttatttaaaaataatacgaaaccttcccttcctcctattagaactgcaagacaagtattgcaatcatcagcttttgaagaaacggattataaaagttgggaatcatattttgaaaaagaatatgaatcatttaaaaaagaacaagctcgccttacttataaacaaatgtattttcttatgagtatctttacagatttctatacgaagcttgagcggaaagctccgcgcgtcatcgccatacatgaattattcaggttacatgcagcaatttactgctttcaaaaattattagaagaaattcaggcattcgaagcaaacaaaacgtattcttatcaccaacctgttaatgtcattcgcctatttgtagataaagtggaatccatcgttcgggacttacaatcagaagcgattccttcagagtctgaaataattttgcaagaaacaactcgtctcgttcatgaagtattcttctctaccgacgcttatacgcaagagcgatttttcatttatcgtcacatatggagtgaacttttaaacaataaagagaacatacaagaggaagaaaaacgaatcgatacgaaaatcaatccactatccaaagcattagcgtcttctcatcttctctttttaaatgatgaagatttactagcgatggacttactaaagaaacaacctgcttctgttgtgagtctatacttctattggttagaagaactattaagtgccatgcaatgggatcgtgcaaaaaactggctttcctttacgtataaacaagtaaagaaaacgatccaagatcacgaaaatacgattttcataaaagatatcgttcggctatttgtaatcatgtatgaaacatacgcaacacatacaaatgaacaagctggttttgaaatgattttacaagaactattaccgtatagtttcacaaactacgaacagtacgtactcgcgaaaaaacagtatcgcacatgggcagagcttcatctcttatatggatttgaggcaatcgaactgttgaaagagccactgaaagatattgaaaaagaagcgccagaagtggcacttcctctttaccatcttgctgctgtagaggcgattgaagaacgaaatcgtaaatcatataaacgtgcagttcgttacttaaagaaattacgtacattatataaacgattaaaacgcaccgatgaatgggatgctttcattattcacatcgccaatctccattcacgtctgcgtgcactacaagaggaattacggaaaggaaaattaatcgatgatcaatcaaactgaagtaacaattaggctccagcatgttagtcaaggttggttcctttggggagaagatgacagcggtactccattatccgtaacaagttggaaacgaaatgcattcacatggcactccacttctttctacggtacgtttctaaaagaagcaaccttcgaaggaaaacaaggtgtgctgctaacaaatgcacaagcctttgaatacattgcaaacaaaccgatgaattcctttgcacatattcaaataaacggcatgattacagcacttacgaaagatgcaaatgaactatgggatgcctttacgagtggtagtttcgtaccagatatgaatcattggcctaaacaaccatcttggaaagttcaaaatacaccaattgaagatgacacattagcatcgcttttctcagcagcagtaaatgaaagcatattacaagacaaccgctcaaatgacggctgggaagatgctaaaagactatatgaacattatgactttacgaaaagacaactggaaacagcactacatgaagaagattggcttcggaaaattggttatattgaagatgatcttccgtttacaatcggactaagactacaagaaccacaagaagaatttgaaatgtggaagcttgaaacaattgtgacaccaaagcgcggggcgcatcgcatatatgtatatgaaaacatcgattccttaccgaaaagatggcacgattacgaagaacggattacagaaacacaagaaggttttagtaaactcataccgtggttaaaagaaggagatacgttccgaaatgaactctttgaaacagaagcgtggaacttcttaacagaagcaagcgacgagttacttgcagccggtattacaattttactaccatcatggtggcaaaatttaaaagcaacaaaaccgaaattacgtgtccagctgaagcaaaatacagcacaaacacaatcgttcttcggtatgaatacgctcgttaattttgattggcgcatttcgacgaacggcattgatttatcagaaagcgaatttttcgaactcgttgaacaaaataaacgtctatttaatataaatggtcaatggatgcgactagatccagcctttatcgaagaagtaaggaaactcatgaaccgtgccgataaatacggactagagatgaaagatgtcctgcagcaacatttatcaaatacggctgaaacagaaattgtagaagatgatagtccgtttactgatattgaaatcgaactagatggatattatgaggaactattccaaaagctgcttcatattggagatattccaaaagtagatgtccctacttcactaaacgcaacacttcgcccgtatcaacaacacggcattgaatggttattatatttacgaaaacttggatttggagcattgctagctgacgatatgggactcgggaaaagtattcaaacaatctcttacttactatatataaaagaaaacaatctcaaaacaggccctgcattaatcgtagcgccgacatctgttcttggaaattggcaaaaagaatttgagcgtttcgcaccgaatttacgtgttcaattacattacggaagtaatagagataagggcaattcttttgaagatttccttcaatcagcagatgttgtattaacatcttatgcattagctcaactcgatgaggaagaactaacttcattatgctgggatgctgttattttggatgaagcacaaaatattaagaacccacatacgaaacagtcgaaagcagtacgaaacttgcaagcaaatcacaaaatcgctttaactggtacaccgatggaaaatcgccttgctgaactttggtccattttcgactttattaatcatggatatctcggaagcttagggcaattccaacgccgcttcgtcacaccaattgaaaaggatcgtgatgaaggaaaaatccagcaagttcaacggtttatctcaccatttttactgcgccgaacgaagaaagatcaaacagtcgcattaaatttaccagataaacaagaacaaaaagcttactgtcctcttactggtgaacaagcttccttatatgaacaacttgttcaagatacactgcaaaatgtcgaaggattaagtggcattgaaagacgcggctttatattacttatgctgaacaagctaaaacaaatttgtaatcatccagctctttatttaaaagaagaagagccacaaaatgtcgttgaacgctctatgaaaacaaaaacgttaatggagctcatagaaaatataaaagatcaaaatgaaagttgcctcatcttcactcaatatatcggcatggggaacatgctaaaacgcgtgctagaagaaaaattcggccagcgtgtcctcttcttaaacggtagtgtaccgaaaaaagatcgcgacaagatgattgaggagttccaaaacggaacgtatgacattttcatcttatccttaaaagctggcggaacaggattaaacttaactgctgccaaccatgtcattcactacgatcgttggtggaatccagctgtggaaaatcaagcaacagaccgcgcatatcgcattggtcaaaaacgatttgttcatgttcacaaactcattacaacaggaacattagaagaaaaaattgatgaaatgctagaaagaaaacaatctctaaacaatgcagtcatcacaagcgatagttggatgactgaactatcaacagacgaactaaaagaattactcggtgtataaagtgaaactttaattaggccaatcacgtagagttttactacccgcaaaaaaagcgctaatctcgaaatgagattagcgcttttttctattccaaaaccaattacttattataatccccgttaacccgccgcacgtatcaagcaatgaatcttgccacattggtgtacggtctcccgtaaaccattggtgaatttcatcaaatgttgcataacccgcaacgaaaagaagggcatatataaaacatcttttcctcgaataacctgatcgatgaaaagcgtaataaatcaatgaacctagcataaagaacaccataaaatgagcacctttacgaaggaaaaactcaataaatccgcctacacctttattcgcaatactaacaggggttcctccaccataatcgatagatacccatgaaaaatgctctttcacaaattcaacatttacatattgttcaatatctgaacgcatatcctgctttttatatggttgtgccgaagaatagaaaatcagccccatccatagtaatacaggaatccaaaataaccatttacgattcattatccagaattctcctctcttcatcttttaagggtaccaaaaaaaagaaaaaatttcacgccaaaacatgacattcacgccctatttataaagtgaaagggggtgatacacatggcaattgaaacaatcgtaatggatttaactttacgtcttgtcttaaacaacggattagataagaacggcaaaacagttttcaagagcaaacaatttaaacgtgttaaaacaaatgcgagcttagatcaagtacacaacgtagctcatgctctagcttccttacaagcatcaccacttcactctgtacaacttgtaagcacatcagatctttctaaactataaagtaaaactcggatcagtggggattttattcatccccgctgattattagcccgcaatttaaccaacagacccaaatcccgtaaatagcgggataaatacaaaggagggaataacacatgcaagtactagagttgattttcgcgaaagaagatggaaaaacagtcgttttttctatcgatacgcccatcacaccaatcgatgcacaagtcgtaaatcaagtaatggatacaatccttgcctcatctgtattttcatccattgatgaaaatacaagaaaaaagggagctcgccttgtagaaaaaaatgtatctgaagttccaattactctataaaatgaaaaagacgaatctgcatcattttgcagattcgtcttttttcttcggcatttcaatcgggataaaaacctttgaaaaaccgacgcatacatacttataatgttcttcccctatatcaaactcagtcgtatatgttgagaagaatatataatcatttcgcttcgtataatgatcaattaataacccaacttgtggttcaacatactttttcgctaactttttaccggccgatgccaaatcgccaaggagaccctcttcattctctttttgaacttcatctagcttcttactcacatcattacgcttcataaactgtttcgctgcccattctgtatattcgcccttactcggattactgtttgctaaatatactaggagaacgacaactaaagccataataatatactttttcttcatactatatcaccgcctactcttttctattttcatatatatgtacaagcgatgcaacttagaaagactatcacctattgattgtaaacgaatagccaaaatttacaatatgaaatagaatattaacaactaatttacttaatttatatataattatattcagaatgtaaattataagggaggatatagaattatggataatgaaaacaacatttttatttctagttctacaatgatgcttgaaccatgtaaacacccttattaccgtacaaaaattattgacagtagcggaaaccatctttactcctgtcaaactgctctccaacttatacagaaatcttgtctaacaaatattcattctacttatcaagggagacgtaatgctgtaaaaacaaaatttaaatttaaacaaaacgttccaattccgatcaatcatagagaatatatttgtgctttcccaacagaatctcctgcttctccaaattgtatttggcttttcttcaaacatgttcatacaatagagtttttcaaaaaagctaaacgagctaaaattcatttttcaaacggagctaccgtaacgatacaaattagttcccataagctaagtcagcaattatggaaagcgggatatgtattatcccaaatgaacatgcaagattcatcaccttaataacaaatagaatggaaggtagtatttcctcaccttccattctatttgctatttttatccttttacactatcgcgcattttctcgattgcttgccgatacatccaccttacttgataatatgtcatttccgtctctaaagcgatttctcccatcgtcttccctacaaaaaaacgttcaaaaataatatacttctccttctcgtctaacacactcataaaatccttcactcttatttcaacatcttcaaaatgaaagatatcctcatactcacctacacatacacatctttcttgcaaagtagattctttcttcaatctttctaatatataaccacgcaccgttacaagtgcatatgcagggaaatatcccttctttgcatcaaatctttcatacgcatgccaaagaccaattaaaccacattgataatactcttcataatcttgacggatacctaatttctttatttgatttacaatcatcccttcatacaaaacaactgtctctataaaagtcgctggcttcacacagtacccgtttctaaaaggtatacctttctagtattccgcggtaccttcacaatataaaaataaacaaaagatttcaccgtgagtaatttcaaatactaccgacggaatttgaaattacaccagctagtatttgaaattttgttggtggtatttgaaataggggtaaaaataaaaaaggctccttctatacattagaaggaaccttttgtttatgagttctcaagttatactattctgtagttatatttttgaaaaatctatcgatcgcatatagaccagtagctaaaatataacttgtaacatgaacaaaaaatttgctataagtttcttaaatatatgtatcttctccttataacaaaaatgcagcaattacttttataattgctgcatttctttctagttacatgaaatatcaatattattgcaccaatcctcttagtgcaccaaagccgatcgttaaaatgaagaagataaccataagaatcgttgccttctttttacttaaaccggccgtaatttgaagacctaaccatgtgataacaaatccccaaattgtaaatacttcaatgctatttgcaataccttttacagcgcctccacttgaagcaaaaattgggcctaaaccagtgtaaagttcttttcctgaaccacctagaataagtgctaaaactatatttattaataaaccaagtactgaaataatgcttgaatatacattaattgttaataatttcttgtaagaagtatcattgctcattaacatcattaacactttatatacagcagcactaatgaagaaacctattatcataccgataacaccaaatacaaaaccagcaccgaaagtcattacaggtgtaacattaacccctaattcttgattgagcttaattgattcaggtgttaaagaatatacataagcaccaattccaccagtaatccccgatagtaaagaaagtatccaaaacgcaccccaaactgcattactattcttcattctctcaaactgctcacctggagaagtaatcattcctaataatgatggcttcttcgcacctacatcttgcgtattaatatttgcttccattataacgcctccttctatttatataacccgttctaacgggcggttcacttcctcatatagaggctacgaaccgcccactagaacggtaatgtgtagttctactacactattaattactcataacgcaatgcttcaattggatctaatttcgcagctttatttgctggaattaatccgaaaataataccgagtgtcatcgagaacagtacgcctccaacgacaacttcccacgaaacgagtggtggccattttgcgaatgtagaaacgatatatgctccgccatacccaagaccaattccgattaaaccacctagaagtgttaacataacagcttcaattaaaaactgtaataaaattttactacgcgttgctccaagtgctttacgtacaccaatttcacgtgtacgctccgttacagatacaagcatgatgttcataacaccaattccaccaacgactaatgaaataccagcgataccaccgatgatcattgtcataataccagtcatcttcgaaataccttcttgaatttcttttaaattcataacttcatatttaccagttgcatcggtcggtttacgactatttaaaacatctgcagcttttttacctgctttttctagattatctacattttttgcttgaacagaaatattttgaatttcatcttttccatacagtgtcggccataatgaaattggaactagtgcttctgatggtcccattcccataaactcattatctgatttgtagacaccgataatttgcatcggttgacctttcatttcaataattttaccgactggattggtatccttaaacaccttttcttccatttgtttactaatcatgacaacgttattaccctgatccacatctgattcttgtaaagaacgtccctttaacaactttactttatttactgcaaagtactcactatctaatccagtaatacttaccatttcttttttatcttcaatatcaagtggttccatgctggaatttgttgttaccacatgtgcgatctctggaatttttttaatttcaaaaatgtcttcttcagttatcttcggtgcttctaccattcccataccgaaaggatcgtttatatctgcactataatgaatcggaaccgtttgattacctgccccaacaaactgcgatttcaatgcagcttccccgccttgcccaattgcaacgacagtaataatcgaacctaccccaataataataccgagcatcgtaagagctgaacgcagtttatgagctaaaatagaagacagggcaatttttatactatctagtaaactcataccgcacaccttctatcttctgtaactttcccgtctcgcagtacaatgcggcgggaagaatacgctgctacttcctcttcatgcgtaaccataacaatcgtcgtaccttctgcattaagcttcgtgaaaatattcataacttgctcaccagacttcgtatcaagtgcaccagtcggttcatcggccataatgaacgttgggttattcgcaatcgctcttgcaatcgctacacgctgcttctgtccacctgataactcatttggtaaatgatgcacgcgatctgccaatccaactttacctagcgcttccaaagcacgcttgcgacgctccgctttcttcacgccaccatatacgagcggaagctcaacattttccactgcggaaagacgaggtagtaaattaaaatgctggaatacaaagccaatatattcattacgaattaaagcaagctttgactcgtctgctgttaagatattcacgtcattcagcatatattcgccttctgttggacgatctaaacaaccgataatattcataagcgtcgacttaccagaaccagacggccccataattgaaacgaactcaccgctctgaatcgttaaactaataccatgtaaaatcggcaccgccaattttccttgataatacgttttagcaatatgatttaacgtaatcatttctctttcacttccattccgtcatacacatcgtcggaaggatttttaaccaccttttgccccactgttacgccttctacaacctctgtccagtctccatcagtagaaccttttttcacattttgtttacgaagcttacctttttcctcaacataaacaaatgcatcatcgcctttttctacaatgctcttacttgggacagcaatcattttcttattctctaagtttacctgcaatgaaacgtggtagcctggagataaaccgtcttggctatcaagacttgctttatatgtatattgagacatattttgagttgcttcacccatgccgccagcttgcgccatctctgcacttgttgggaactcacttacctctgtaatcttacctgtccacttcttcttattatttgctttcgcagttacagtgaatgtttgatctttttgaatttgtgacttctgaagctcagttaacgtaccttgaacttggaatggatctttagaagctacttgtaaaaacgcttttccttgaccgcctagcgcttgagatgaactttgtgccgcatctttatctaacttttgaacaacaccagcaaaattgctataaatcgtaagttctttctgcttcttacttaactcttctttctgcaactttcctttttctttctcaaggtcaattgttttttgtcctatctctaactcgtttacttgctcgtccattggatctgttacttctttcccagctccgctatctttcgccttcttaatttctttcttcaatgaatcaatcttctttttcccttgatcgtaacgcatatccgccatcttctgatcaagctcagcttgcttcatttgaagattaatctcttcattgtcataagagaataacttcgtacctttttctacctcttgcccttcttttacctcaatatctttcacttttcctttggccggatctgcatagaaactttcaatattaccaggcttcacctgaccagaaattaacttcgtattattcagcttacgttctgtcactttctcaaaacttacagcatcagacgttgttgatgcacccttcttcttaccttgcataacaaaaatattaattgccgctacaataacaattagtgcaataaccccaataataatccatttcttcttcttgtttggagtacgaaccgtatttggtaacatattctctctcctttttataacttaatagtttaatataaaaattgtataaaactttctgaaaatagattacatattattacattgtttttacaaagttttacacatccatttatattgtaacaaaaattccaatgattagaaatatgacattatatcttttaagatagatttaaggaaagtttatattatatagaaaaagccatccaaaataataattggatagcttttcaaacaaaatattacgctactttaggatcttttctctcatgtccacgttgaacaataaataagaagattgttgataaaaccgctcctgttaatagtaagatgaaacaaccatcccagccagaactatcaacaataacaccaattgctgcgttagctacaagacttccgcctacgtaaccgaatagaccacacataccaactgtcgtacctactgcaaatttcggtactaattccatcgcacttaaaccgattaagaactgtggtacataaattaaacaaccgataatagaaactgcaatacttacaacaagtacgctagttgcttgccaatatataaacgtaccaataacaactccaaccatactaataatacataatggcatacgttttcctttaaataatttatcacttaaaaaaccaacgattaatgaacttggaattgccataccttcaaagattgcatatgccgcatgcgcttctgcttttgaaaatcctttaactgtcgttaaataaagtggaacccagttaataacaccgaaacgaattaaataaacaaaagcattcgcaatacataagaaccatacaaatttatttttcactacatacttcattaaaatttcttttggtgacatcttgttagcattatctgctttttcaagattttcatagtcattacgatactcatcaattggaggaagaccttcagattctggtgtatccttcgcattgatccaaacaagtactgcaattaccattgcgataatcgcagggaaaataaacacgccgccttgccaatgattttcaccgaaaatacctacaccaattccgacaagtggtggtacaagcattccaccaacgttatgtgaaatattccaaaggcctgttttcgtaccacgttctttcttcgagaaccatttcgtcataacaatactacaaggtggtgctcccataccttgtacaataccgttaacaacaagtaatgtaacaatcatcccaaaggatgatgcaaagccgaaacaaatatttacaagccctgataagaataaaccgactgcaataaagcgctgggcgaaagctttatctgataaattacccataaagaacttactaaatccataaacaattgccattactgagcctagtagaccaatttcagctgtactaaaaccatattcttgtactaaatacgtacttgataacgtaaagttactacgaactaaataataagcagcatatccaactgaaattccgattaacacacgaatacgtagtaatcgatatacacggtcgatcatatccgctggcaatctttcaattgcaggtgctggcttgagccatttaaacatatattttcgtctccttttctcacttcagagagagacgctgtctattccatatctcgattattccgctatttgatatattttggttcgtccttctaaccggctgtccttctatttctttctcattcttcgcaaacatcgttggtacgccaaacgacactttttctaaaatatgccccgcttcttctgataaacaataatcaataaataaatccgcaataataccactcggtgcacgttttagtttcgaaatcgcattaacggataaccctgtttgctcaggttcgttacttaaaatcggaaagccttgtttttgaagcattctctgatctcccataaagttgatgcctatcatatattcaccgctcgcaacaagttctgctgggatgtaaccattcactgttacttctccaacttgttctgccagattcttcacatatcccttcgcttcctcttcacctaacgtatcaatcagtgattggaaaaacgtatatgctgtacctgaaacatttggatcgggcatgacaatctttcctttatatactggattcaataaatctttccatcttaacggatacgagagaccgagcggcgctatttcctcgttccaccgctctttattaatcgcaattgccagcttctccacttcataaccgtaccaataaccatctttatctttaacagtttttgaaatacgatttgcatgttggcttatcacaggaatagaaagatttttttgcttcatcatttgatgcgcatctactgtaccgccaataataatatccgccttcggatttccagcttcttcttccactctacgaagaagttcttctgttgaaagacgaataaattcatacgtacatccgcgcggcttacaaaatgatgaaagtaacgcttcaccaacttcctcacgagccgctacatacgcaacaatatgacgatcatccaaaatagggagaccatttttactatatttaatagaggttgtatctcgagagcaactagacatcgctcctccaattactagcaaaaagaagaaaaaggctatctttctcatgacgcattctcctttacgaataactctgctagagagcctttcatatacatgacatttccgttattatcaccgagatattgcacaacaaagtacgatggatacacagaaatcgtaagaatatcttcacgatcattttttacgcgcttacctgttttataagctgtaatataagcaatcggttcattctgcgattgtaataacttctgaatttctccgtaatctgtaatttgctttgcgtaccaaatagaatcaagtatgtgcgtaagattgatagtacgtaccacatcgccttgacgtactacgacatcctttgctgaagcaaagaaatcactaatacgctctggcgtgtaatacaggcttaataaatacgtttgaagtgctgaaatcatcggatccatgccattctttccgtatacattttccccatactggaacaagtcacctactgcaaaagtacgcttatgtccattcaagtacgttacttctccagtaaatacttgttcttggctcttaacgtcccctggctctattcgaattcggtcaaagaatgaaacaatcgtatgcaaacgaacttcatccgttacaacgatttctccccacttttcatgtcttactttcacttcaattggaagagattcattcaccctttgtaaaacggcttgtttatcatttacaatgttgattcgattatagatttgcttctccataacataaaacaaaacaagagaaacaatcatacaaatgacaaacataagaatttgaaatgatagccttttcatttctgcctacctccaagataaaaaaacgttgtttcgaaaataccgcataattgtttcataaatgtatcatttaaccgctttcaagttttttatgtcttccatccttctcggaagcaaaaatgtaatgaatattgtagtacctatttcttcactactctcaatccgcatgcttccgccctgcttattcataatctcctgacaaatatacaaaccataaccattcccgtaactagaaggaagtgcctttcctttcggagactcattccactctgcaagcaccacttcatctataccgatcccatcatcatgaacaaaaaccttcgcctcatgctcatttacaattacattcatacgaatgtgcgaagcatcactatacttaattgcattatcaagcacatttaagaaaatttgcttcgtcttatcaaaatccgcaacaacatgtacatccgttaactcatttaccacttcaatttcaaactgatttagacgaggtttcacaattgaaactgcttcttctgccaattcctttatattcacaactgtaggagacacttcaaacgtactcgtcccatatttcgaagacttaagcagttcctctacaagtgataataaacgctcactttccaccgccacataacgaagactttcctgtacatcttctttcgattgtaacttcggaattaaatccacataaccgataattgccgttagcggtgtttttagctcatgcgtaatgcggtctagaaaatctttctgcttttctttctcctcctgcaactgcttaatatgcagctcaattccatcggccatcgcattaaaagatgctgaaagctgagcgatttccacatactcatttaactcaatcttactcttataatcaccattcgcgagccgctgtgccatttgtctcaactgatcaattggtttatgaagagacttcgccaaacgaatcgcaaagaaaatacccgtagctactaaacaaagagatgtcattaagaaagtccagctcacatttgttaaaacttccttctcacccgttaactcatttataaaacgaatacttccaatgacatcgtttccataataaaccgggcttgaaaacaaaagaataggagctggatccgcctcctcaaaaacgtaagacttcttccccttcaaagaactctcaatgtcgatgttacggtgaagcaatgctcctttttgtgtatctgcaacaacatcgccattcttcccgatcatctgcacacggacatccatacgcttcgctaaatacgacgcaattaaaagtgaattcggaccaagcgtatccacttctgcttccttctctaaataattcatcgtataaatttgtgcttctacacttaacttttctaaagaatctgctgcgttatgatacatattcttttctaacgtaatataaacaactgcatataaaagaacaaaaatcggaattaacagcccaactattccaaacaccatatttcgctttaaagacataccatcaccacttaacaatccagtttatagccaacgccataaattgtcttaatatattccccgctcgtcccaagcttctttcgaagtctctgcaccataatatcaactgctctcgtatttccgatatactcaaatccccatactttctcaagcaactcatccctcataaacacacgctgcggatttgaaacaaataactgacataaattaaactctcggtacgttaactgaatctcttgtccactcacatgtacctttctttccttaggacaaatcactatctctccagcctcaattacttcatgacttacagccgcctccgtcttctttacacgccgcgccatattcttaacccgaagaataagctccgcataattaaacggcttcgtcacataatcatcagcaccaagctgcaagccaagcaacttatcattcatctgactctttgccgttaacatcagcaccggaatatccctatccctctcacggaacaaacgaagcaactcatacccatccgtatccggaagcataacatccaaaatcaatacatccggcccttcattccatctctctaaagcttctctcccatcagccgctgccaatacttcataaccttccatctccaactgcatccgaatcaaattacgaatactcgattcatcatccaccacaagtattttcatcattctcctccttccaccacgtattatagtacagtttagtatagcaaaaatcctataaaaaaagagagggtattgtcgaacatattttgtcgacgataccctctccccttttattatttagctacaaaataatccgttacatattgtgcccaaacttcatgacctttagcagttgggaaaccaaattcttcttttaagtatggtaggatagcctttgtcgatgcatccggccatgctccccaatgatcaatatatgtataattattttgcgttgcaaattgttttaatgcttcaatcgatttcggataatttttcgcaccatacactggattcgatggttgaatcataatcgtagcgccttttgcactagtagaaagtgcttgaacaaacttctgtgtattcacaacagagttcccattaccagttttaccgttatcggtaataaatggtggttcaaataaaatcacatctggattgtctttcgcgatctctttatcacgcttattcgcgattaactcttctgtgctttcacccttatattcctttacagtcacattccataaacccttaccgtaagccgtttctaaattagctgttaacttagctgcccaagcacctttttcagatgaagaaccttcatcaccaacgataacaagatttactgcctttttatcctcagcagctttctttaacttctctttcactgcatctggcaagttcttcgcgtatgcttcgttaaaagatgacttcgcatcttgttttttctcttcctttttctcttctttcttcgctccgctatctttcacttcagcctttgttttcgttacttcactcgtttgtcccgttgcattcgcaatcttcttattccagtacaatttaccgctcacaatcgaagcaacaaacaatacaaaaataacaaggacaagtaccgctttcttattcatcgattcacctcatctattaatctcacaatatataatactaatataaatccatgcaaaaataaacccaactccttccaaaggagttgggttattacatattatttagtcacttcaagatgtgctcttaacttattcgttaaatcttgttttgctgcatccggaacatagtagtaccaaataccatcagcggctttgtggccgtcacctgggatttgaatttcttcactgttcttcaagcaatctttatagttcttttgcatatcaaacatttgatcttgcgttaagtttgttttcacgttcttttgaattgctgttaacacatcgccatagcttgttaaagaagagaaggttgcacctttcttaataacagcttgcatcacttgacgttgacgcatttgacgaccgaagtcgcctcgtgggtcttctttgcgcatacgtgtatatgctagagcttggtcacctgttaagtgaatattccctttctggaagtgtttcccttctagggagaattctaaatcattattaacatcgacaccgcctactgcatctacaatatctttaaatccttccatgtttacttcaatatagtaattgataggaacatttaagaatttttctactgtcgctacagacatgtctacgccaccaaatgcgtacgcatggttgattttatcacttttaccctttccaacgatttcagtatacgtatcacgaggaatacttactgttttcattgaattatttttagggtttaatgtaatgaccattaaagaatctgaacgtcctttatctccaccacgctcatctgcacctaatagtaaaattgaaacaggttcagatttattgattttttcttctggtttattaccttgatcgcgttttaatggtttatgaacttcatctaatgtttttgaaacagaagaatatatattataagcgtaagctcctccacctataattagtactcctataattcctaatatccaaaataggattttctttttcatgcttttaaccttctttcttcaggtaccgctatcaaattattataactacaaaatataaaatacattatacatgtaattcaatttttaagccaaactatattgataactcaatgaaagttttagcaacctataaccaattctctagttactaactttttgatatccagtcttattttcagactgccacctccaagaatctgcacacatttcttctaatccgcgtgttgcctcccagcctaattcacgctttgcttgttcaatccttagtagctgcttaatatatttgtctaattttttgggttcagttcattttgatagtctttttttgttgtatggattgaattatataatgtattgcaaatagaaataatagaagtaatgcggaaaggcggtggggggaaatgaaatatccagaccatttagtaaaacaagtgcaagagcgcagtgctccttatcaactagaaggttttttaagtggacaaggtcctgaaaatcccaaatttatgttgttaggagaggcgcctggtgaaacagaaattcataatgggattccgtttagcgggagggcgggaaaacaattaatggattttttagagcgtattgatgttacaagggaagaagtatatattacgagcgctgttcgaagtagaccttataaatggcgagagaaaaaagaacgaaatggtgaaatcatacaaaaaaagtataatagaacgccaaatcagggagaaatagttgcccatgcgcctttgttagattatgaattagagaaaatacatccgaagcttatcgtcacgcttggaaatatcggtcttcaacgtttaacaggaaaaaaaaaaacaatcacagatgtacacgggcaattattaaaacagcccattcaaaaattaaaggatatgcaaagtgcagagtttacatggtcagagaaagaatatcatgtttttccgacttttcatccagcttccattttttataatcggagtttattggagcttattcatgaggattttgagaagcttaaaagacttgtaataaaaaactagaaaagctaaggcgcttttctagttacatttaattatgtaaagggtttttattttcatctaacgtaaatccttcaccaactacatcatgtacatcacttacagcgacaaaagcatgaggatctacagaagtaatgatattctttaatttcacgatttcatttttagcaacaacgcaatacaatacgttacgttccacttttgtatacgatccaacagcttttaaaaaggttgctccgcgctccatttcagataaaattttggcagcaatttcatcgtttttctctgagataatagtcgctcctttggcagcataagctccttcttgcataaaatcaatgactttagcaccgataaaaacagcaactagcgtatacatgccctcgcggtatgataaataggtaagaatagagactacgataacgacagcatcaaacataaacattgttttccccatactccagccaacatatttgtgagctagtcgtgcgataatatctacaccgccagtagtcccgccatatttaaatattattccaaggccgataccgataaatgccccggcgaataaagctgcgagtgtcatatcattttgcaagtttaaatgtaagttgagtacttcgtaacgctggaaaatccatagaaataaagatacgctaaaggtgccaattaatgtatataaaaatgtcgttctgccaagtaacctccaaccaataaaaaatatagggatatttaaaattaagtttgagtaggaaggatcaaacttaaataaaaaatacaataatagtgtaataccagtaaacccaccctctgcaaggtggttttcaatattgatattgacaataccgaaagaaaatatagcggaaccgattaaaataaaaataatatttcgcatcttcaattttgatgtcatatagaaatccccctaattatgtaatgattgcattgctccgctgaaacagtaaaacataataataagtaatttctagttgctagtgaaaatagtaagaacttgattgatgtgggctgatcttttgtgaaaagcacaaaagaaggtttcacgttatcccgctctaacggctgataggagatgaagcaaagaagaggggcaaaccagccgtaggaacccgattagttcaactaatcttttgcaaaaaaacgcaaaagaagtttcactttattatagtctatccaaaaatgggtcgcaaataggtgtttggcggggaataatatttgtcaaatcgcgatgaattggctaacatgaaagaggaaggattagaggtgaatagtatggaagcaaaaacgatgaaagatatgcagaaagaagtagatgcatatattggtcagtttaaagaaggttatttcagtccgcttgcaatgatggctcgtttaacggaagaaatgggagagcttgcaagagaggtaaatcattattatggtgagaaaccgaagaaaacaactgaaaaagaaagaagtattgaagaagagcttggagatgtattatttgttatgatttgtatggcaaatagtttaaatattgatttagagacagcacataacattgtaatgaataaatttaatacacgtgataaagatcgctggacacgtattgatgagggagagaaagaataatgaaagaaattaaagtaattatcgccggaccaagaggacgtatgggacatgaagcagttcttcttatggaaagaacggaacattttaatttagtagcagcagtggattataagcatggtggtgagaagatttctgatttacctggcatgccagcattacatgcaccgatttacgctgatttacatacttgtttagatgaagtagaagcagatgtgttgttagatttaacaacaccagaagtggggaaacaacacgttacacttgcagttgagcgtggacttcgttcggttattggtacaactggatttacagaagaagaattggcacgtttaacagagaatgcaaaagaaaaagcagtaggaacaattattgctccaaactttgcaattggtgcagttcttatgatgaaattctcacaaatggcagcgaaatatttccaagatgttgaggtaattgaattacatcatgatcaaaaattagacgcaccatctggtacagctgtaaaaacggtagagttaattcgtcaaaatcgtgaatcaaagcagcaaggtcatccaaaagaagtagagcaactagcaggtgcacgtggtgcaaatgtagacggtattcacattcatagtgtacgtttgccagggcttattgcacaccaagaagtaatgttcggtggagatggacaaatgttaacagttcgtcatgattcattcaatcgtgcatcatttatgtcaggtgtaaaactatcaattgagacagtaatgaaccttgatcatcttgtgtacggtttagaaaatattatcgactaaaggggagacaacggatgaaaattgccttaatcgcacatgacaaaaagaaaaatgatatggtttcgtttgcatacgcatataaaccaatttttgaacaacatgaattatttgcaacaggaacgacagggcttcgtattatggaagcgactggattagttgtaacaagatatcaatctggccctcttggtggagatcaagaaattggtgcaatgattgcaaagaacgatttagatatggtgattttcttccgcgatccattaacagcacagccgcatgaaccggatgtgaatgcattgcttcgtttatgtgatgtatatgcgattccacttgcaacgaatatggcaagtgctgaaatgttaatgcacgcattagagcgaggagatttagattatcgtaagttaagaaaatgaggggaacaattatgagtggattacatatattagcgtttggtgctcatgccgatgatgttgaaatcggcatggctggtaccatcgctaaatatacaaagcaagggtatgaagtaggtatttgtgatttaacagaagctgatctttcttcaaatggaacgatagagttgagaaaagaagaagcgaaggttgcagctcgtataatgggagtaaaaacgaggctgaatttagcgatgccagaccgtggtttgtatatgaaagaagagtatatacgtgaaattgtcaaggtgatccgtacatataaaccaaaactagtttttgcaccgtactatgaagatcgccatccagatcatgcaaattgtgcaaagcttgtggaagaggctattttttcagcaggaatccgtaaatatatgccggaactttcaccacatcgtgtggagtctttttataattatatgattaatggttttcataaaccgaatttttgtatagatataagtgagtacctctctataaaggtggaagcattagaagcgtatgaaagtcagttttcaacagggagcgatggtgttaagacaccgttaacagaaggttacgttgaaactgtaatcgctcgtgagaagatgtttggaaaagaagttggagtcttgtatgccgagggatttatgagtaagaaaccggttttattacatgctgatttattagggggatgtaaatgaaattaaaaataggtattacatgttatccttctgtaggtggttctggagttgttggaacagaattaggaaagcaattggcggaacgtgggcatgaaattcactttattacatcgggtttaccattccggttaaataaagtatatccaaacatttattttcatgaagtgacggtaaatcaatactctgtatttcaatatccaccatacgatttagcgttagcaagtaaaatggccgaggttgcacaaagagaaaacttagacattttacatgtgcattacgcaataccacatgcaatttgtgcatatttagcaaaacaaatgatcggagagcgtattaaaattgttacaaccttacatggaacagatattactgtgttaggttccgacccttcgttaaataatttaattcgttttggtattgagcaatcagatgttgtcactgctgtctcgcattcattaattaacgaaacacatgagcttgtaaaaccaagtaaagaaattcaaacggtatataactttatagacgaacgtgtatatttcaagcgtaatatgtctcaattaaagaaagaatatggtataagtgagagtgaaaaagtacttattcatatttcgaatttccgtaaagtgaaacgtgtgcaggatgttgttcaggcatttgctaaaattgttaaagaagtagatgcgaagttgcttcttgttggagacggaccagaattctgtacgattttacagatagtgaagaatttacatattgaagatcgcgttttattcctagggaagcaagataatgttgcagaactacttgcgatgagtgatttaatgttgcttctatcagagaaggaaagttttggtcttgttttattagaagcaatggcgtgtggtgtaccttgtatcggaacgcgggttggaggtattccagaggttattcaacacggggaaacaggatatttatgtgaagttggcgatacaacaggagtggcaaatcaagctattcagctattaaaggacgaggaacttcaccgtaatatgggagaacgagcaagagaaagtgtttatgagcaatttcgctcagaaaaaattgtttcacaatatgaaacgatttactatgacgtactaagggatgacaaaaatggaaagatttaaaaaagctagttctattattgagacattaaagcaacaaggacatgaggcttactttgttggtgggagcgtacgagatcttattatcgataggccgattggagatattgatattgcgacatctgctctaccagaagaagtgatggctatattcccaagaaatgttcctgttggtcttgagcatggaactgtaattgttgtagaaaatggtgagccttatgaggtaactacttttcgaacagaaagcgaatatgaagattttcgaagacctagtagtgttcaatttgttcgttcattagaagaggatttaaaacgtcgtgatttcacgatgaatgcaattgctatgacagaagaaggcaaaatggttgatttatttgctggacaggaagccattcaacagagagaaattgtgacagttggaaatgctgcggatcgttttcaagaagatgccctgcgaatgatgcgtggtattcggtttgtaagcacgttaggtttttcattagaaatgaaaacgaagcaagcgattgaaacgcatgggcatttgctagaacatatagcaattgagcgtattacagtagagtttgagaaactgttaactggtacatattgtgtgaaaggtctcaaagaattagtagagacgaagctattttctcatttgccatatttacaaatgtcagaagagagactgttaaaagctacgcagtataaatgggattctttcgaaacggatattgaggcgtgggcatttttcttatattgtatcggagaagaacatccatctgtctttttacgtcaatggaagttttcgaataaaaaaataaaagatattgttgcagttttattggcaattcgtactagaaaggagaaggattgggatacagtccttctttataaaacgggaattcatatcgctgaaatggcagagagagtatatgaagcgatgattgaaagctatgaccctacatctgttgaacgagtacaattaatgtttcatgcattgccaatccaggaacgtcaagaaatgaatgtgactggtaatgatttattaaactgggcaaacaaaaagcctggtccgtgggttgctgaaatgcttcagaaaatcgaagaagcaatcgtacaaggaaacgtagttaatgagaaagagcgtataagggagtggctgcaaggatgcaatctactataagaaagcagttattgcaagttttttctgaagcggatggcgagtttgtatccggccaaacaattagtgataaacttggttgttcaagaactgctgtgtggaaacatatggaggatctgcggagtgagggatatgaacttgaagctgtgcgccgattaggttaccgaattgcaagtaagccagacaaagtgactgctaatgaaattcagttagggctacaaacgaagcggattggtagaacagtgtattttgaagaaactgttgaatcaacgcagcacattgcagcaaaacttgcttatgaaggtgcagaagaaggaactgtcgttgtagcagaagaacaaacagcgggaagaggtcgtttaagcagaaaatggcattcaccaaaaggaacagggatttggatgagtattattttacgcccgtcaatcccagttcatcatgcaccgcaacttactttgttagcggctgttagtgttgcacaggcaattgaaaaatgtacaggtgtaaacgtaggaataaaatggccaaatgatattttaattcaaggtaaaaaggctgtaggtatattaacagaaatgcaagcggatcctgataaaattaatgctgtcattatgggcatcggtattaatgcgaatcaaaagcaagaacattttgatgaagaaattcagcacatcgctacttcattagcgattgaatcaggtaagccgattgttcgtgcagaacttatgcaacaaatctatttacaactagaaaaattatatgaagaatatttacaaaatggtttctctgtcattaaaattctttgggaaagttacgctgtgagcatcgggaaagaaattaccgctcgaacgatgagagagacaattacggggttagcaaaaggaatcacagaggatggtgtattacttctggaggatcatgaggggaaagtacatcatattcattctgcagatatcgaaattaagtaaaagaagttcctcttttggaacttctttttatttcaatagttttgagttgaatttgtaacatgataataaattcttttcatatttaaagttcatttcaaaatagcttccgtcgagttgacctggcatgttatttgacgattactttgcctgtcattcctttaagaagatggtatcgacatattaattcatatgtaccagtatttttaggtttcacggtaatattcttttcttttcctgactggactacgacgtcaataccgagttttttcactgtaaaggtgtgctcgtttttacctttatttttcaatagtaatgttgttgatccttcaagcggaatcgtgatgacatttggattaaagtaatcatcatttagttcaacctcaatcactttcgttaaatcggtgggttgtgttacgacatgaactgaggcaaatacttgggaggatcctaaagacatccaccatacaatcattacaagcaaactgctgaatcgaaataaccacctgttcatagacatctgcaattctcctttgttaagtactttcctcaattaacctgcatcattagtttaagagttatactatatagttaaattgattacagaaaaaattaacttggacttttttaacatgcgttgaaaaaacatgtatcttttcaggattgaattatccataaaaactgtatagcatatatactctcgtgttaaatttcatataccgtaataagaataaaaaattattttttcgaaaaaatgtagtaattcctttttgtagtttgctataattagttcgaatgtgggcagtatcagagcgaactgcaccatgattcgaagtcatacgaaaaataataacttggattctgccttgatccaataacggactgggacagagggatgaataatgccgactaacacacaacccttctgcccttttatggccagaggggtttttttatatgatttcggccatctcctctctcctgcataaaggaggagtagtttttgaaaacaaaaacagattttttgaagatgaaagagcaaggtgagccgattacaatgctaacggcgtatgattatccatctgctaaattagcagaagaagctgaagttgatatgattctagttggagattctcttggaatggttgtactcggatacgattcaacagtacctgtaacagtagaggatatgattcatcatacgaaagctgtacgccgcggagcgaaagagacgtttattgtaactgatatgccatttatgtcgtatcacgtatcattacaagaaacgatggtgaatgcacgccgcatcgttcaagagagcggggcacacgcactgaaggtagaaggtgctggagaagttatatcgacgattcaatatttgacgaacgcaggaattcctgttgtagcgcatttaggtttaacccctcaatctgtaggagtgttgggtggatataaagtgcaaggaaaagatgcggagagtgcaaaaaaattaatagaagatgcaaagaaatgtgaagaagctggtgcaatagcgcttgtgttagaatgtgtaccaatgcagttagcagaacttatttcagagcaactaacaataccgacaattgggattggcgcaggacaaaaagtagatgggcaagtgcttgtttatcatgatcttatctcatacggcgtaaatcgtgttccgaaatttgtgaagcaatatacgtctgttcaagaggagattgtgcgtgggatttcacaatatgttactgaagtaaagacaaggcaatttcctgaagaaaaacattcgttcacaatgaaagaggaagaatgcttagcgttatatggaggaaaacaataatgaaaatcgtaactacagtgcaagagatgcagcaaattacgagcgaacttcgtgcaagtggaaagagtattggttttgttccaacaatgggttatttacatgaaggccatgctactttattacgtaaggcaagagaagaaaatgaaactgtagttttaagtgtatttgtaaacccactacaatttggcccaaatgaagatttagatcgatatcctcgtgatattgatagagatgaaaatgtagcaaaagaaaacggtgtagattatttattttatccgagtgtagaagaaatgtatccagcagaacaaacaacaacggtagaagttgtgaagcgcacggacgtattatgcggtcaacaaagacctggtcattttgctggtgttgcaactgtactaatgaaactatttaatattacgctgccaaagcgtgcttatttcggtatgaaagatgctcaacaagttgcagtaattgaagggtttgtaactgatttcaatattccagttacaatcgtaccagttgatattgtaagggaagaagatggtttagcgaaaagttctcgtaacgtgtacctatcacaagatgaacgtgaagaagctcttcatttataccgcagcctatgtatagcgaaagaaagaattgaggcaggtgaacgtaatcccgaaatcattacaaatcttgtgaaagagtatattgagacgcatacgaaaggcactgtagattatgcagatttatatgcatatccgtcattaacaatggtagagaaagtcaaaggaagaatcattttagctattgcagttaagtttgaaaatgtaagattaattgacaatataacattaacagttaaataagggggagcatctatgtttcgcacaatgatgagagcaaagttacatcgtgcaactgtaacggaggcaaatttaaattatgtaggtagtattacaattgatgaagacttaatggatgcagtaaatattgtagaaaacgaaaaagtccaaattgtaaataataataatggtgctcgcttagagacatacgttattaaaggggaacgcggtagtggtgttgtttgtttaaacggtgctgcggcaaggcttgtacaaccaggggacaaagtaattattatttgttatgggctagttacggaagaagagattcataaacaagaaccaaaaattgcagtattagacgataataatcaaattattgaaatgttaggtgctgaaaaagcgggtacgatattataagtagaaaggctatctccattgcggagatagcttttttgtgcatcttttcattaagatgagataaaacgtggtatagtaacattatataaattattgttgtttgaaaggtaagaaattgaggtgttacatatatgagtaagcgttatgtcgttgttgatttagagacgacagggaactcctggaaagatgggaaggataaaattacccaaattgcagctgttgtagtagaagatggagagatattggagattttttcgtcttttgttaacccaaagagagagatcccaccatttattacagaattaacagggattgatgaaagtcttgtaaaacaagccccgttatttcaagatgtagccccgatgattgttgagctattacaaggtgcggctttcgttgcgcataatgttcactttgattggaattttttaaatgaagaattaaggcaagctggatatacagaaatacattgtccgaaaatcgacacggttgaattggctcaaattcttttgccgacagccgatagttataaattacgtgatttagctaagaagcatgaactagagcacgatcaaccacatcgtgcggatagtgatgctcttgcaacagcggaattatttttacaatttttaaatgaaattgaaaagttaccacttgtcacgttgcaatcgctttatgaattaagtgatgtgttccaaagcgatatagctgatgtgctttctgaaaatattttaaagaaagtaatgcacggtaaagaagatatagcggagtatgaaatacatcgaaatattgcgctgaaaaagcggaactattccttaaaccttggagaaacgtgttcatcaaagtttgatgctttcttgaataaaacgatggataaattggaatcacatatgccaaagtttgaaagaagagaaagtcaacaactgatgatgaaagagatatatacggcgttaagagattctcgtttttcactaattgaagcgggtacaggaacaggaaagactcttgcttatttgcttcctagtctttattttgcaaagagaaaagaagaacctgtcattataagtacacaaacggtacaactccaacaacaaatattagaaaaagaaattccgttattacaaaaaataatgccattttcatttgaggtagctcttctaaaaggaagaaagcattatttatgcttacataaatttgagtatgctttgcaagaggaagaaaaaaattatgatatggcacttacgaaggcgaagattttagtttggctattgcaaactgaaacaggtgatcgagacgaattaaatattcctgagggcggaaagttactttggaatcgtatttgtagcgatgcgtatagtccaggcggtatgcaaagtaattggtttagtcgttgtttttatcagcgagcgaagaataaagctttatttgcagatatcgttattacaaatcatgcgttattatttcaagatttttcaagtgaagaaccgttgtttgcttcatgcgaacatattatttttgatgaagctcaccatattgaagaagctgcgagtagaacattgggtgaacagttctcttgtatgtattttcaattggttatatctcgtcttgggacgctagaaacagaagatgtactctccaaagtatataaaatgatgaaaaaatcagagcaagcatctcgttcaactttccgtatgataagttatagtttgaaggaacttaagtttgatgcggatgaactcttccaaatgttacgtacttttatatttaaacaaacaaagcaagagcaaggaacgaataatatgccgctcatctataggtataacgcagaactagaaaaaggtaagttgtgggatagtatcgtcgaattaacaaatcgttttatatatgaattaagaagggtagtaactgctcttgagaagcaagtggatatattgcaaagtaagttagaatgggagatgcatgttgtaacaggtgaatttatgcatttaattgagttgctgagaaagatggcagaatcattacagttactcgtattagaaaagaattcgtatgtaacttggatggagactgaaacgaaagggacgattcattcaacagttctatacgcacagcctgtccatattggtgaaagatttgctgatgaatttttaacagaaaaaaagagtgttatttttacatccgcaacactaacagttaacgatacgtttgattatataaaagaggaacttggtttacatgatttcgctccaaatactttaaaggttccgtcaccatttcgttatgatgaacagatgaaattaatggtttcaacggatgtaccttttattaagcaagtaagtaatgagcgatatattgaatctgtatcggaacatattgcaaagatagcaaaagccacaaaaggcagaatgctcgttttattcacttcgtatgaaatgttaaaagaagcgtatgcgaatttaaaaaataatgatgaattagagggttatttattactcacccaaagtgtgaataatagaagtcgaagccgcttaattcgaaagtttcaagagttcgacaaatcaattttattagggacgagcagtttctgggaaggaatagatattcctggagatgccttaagttgtcttgttatagtccgtctaccatttacacctcctcatcagccgatgatggaagcgaaaggtgagtggctaaaaaatcaaggtgaagatgtattcgctaaattagcgctcccacaagcaatattacgtttcaaacaaggattcggccgcttaattcgaacgaatacagatacaggaacggtagtagtgttagatcgtcgtttgacgagttcttcctatggaaaacgatttctacaatcgattcctaacgtacctctttatgaaggaccattagaagaattgttagtacaattagaagaaccatcaaatgaataaaaatggaagaaaaatacgcctgaagtacttataaacttcaggcgtaaaaaatgtgggtaggaggaattttattttttttacttcttgtatacaaaatgtgttggttttcgacttgaaacctttttttgctgtacatgtcctgctataatagatgggtgatgaagcaggggttgtaaagaatgtactcttattgtaaccgcattgcgttcttctataattagaaatttttgtgtaacggaggagttttttcatggataagaaaatcgaagtactatcaacgacgcgtattaaatattcgtcggatttgtataaaattgttgatagtttaaatcgtacgttaaaagagcaggacctcatgttcggactagcattagacgaaaaagataaagaaacagctgtatttacgatttacagaacgtagtgatacaatgaaaaagtggatttttgcaatcattattgttatcgttgctagcggaatatatggggcgtatgtttataataaagcgatgggaaagaaaattccaaaagagtcgaaatttgtagaaattgctaaagaaaaagcaaagcttacaaaggtgaaatctgttgattattacaacggaaaatctgcatatatagtcgtgcaaggtacagatgaaaagggagaacaacttatcgtttgggtgcctgagaaaaaaggggatactgtagtaaggaaaaagagcgaaggtatttctgaaaaagaggctatacaaagaacaatagagcaagtcggcaatgaaagtaaggaatcaaaaagtaagccgaaagagattatgaaagtgaaattaggctttgaaaatgatgtaccactatgggaagttacatatattgatgatgacaatcgttatagttattactatcttgaatttaaagatggaaaatttttaagacgatatagcattgaaaaatagatgtagggggaactacaaatgaaattagcaaagcgagtagctgctttaacaccgtcttcaactttagaaattacagcaaaggcacaagcattaaaagcagagggtcatgatgtaattggattaggggcaggggaacctgactttaatacaccagagcatattatggatgctgcacataaagcgatgttagaagggcatacgaagtatacaccaacaggtggattacaatcgttaaaacaagaaattgtgaagaaatttactcgcgatcaaggtattgcgtatgatccatctgaaattattgtatgtaatggtgcaaagcatgcattatatacattattccaagtattacttgatgagggagatgaagttatcatcccaactccttactgggtaagctatccagagcaagtaaagcttgctggcggtaagccggtttatgtagaaggtttagaagacaatgagtacaaaattacagcaaagcagctgcgtgaggcaattacagagaaaacgaaagcagttattattaattcaccgagcaatccaacaggaatgatttatagcaaagaagaattacaacagcttggagaagtatgtttagaacatgatattttaatcgtttctgatgaaatttatgaaaaattaatttatggtggcgtagaatatacttcaattgcccagctttctaatgcattaaaagaacaaacacttattattaatggtgtatctaaatctcattctatgacaggatggcgtattggatatgctgcaggaaataagcagcttattaaagcaatgacgaatttagcgagtcatagtacgtcaaaccctacttcaatcgctcaatacggcgcaattgcggcatatgcaggctcacaagaacctgtggaaacaatgcgtcaagcctttgaagagagattaaacatcatttatgataaattaattcaaatccctggctttacttgtattaaaccgcaaggggcattttacttattccctaacgtaaaagaagctgtagctttatcaggatatgcaacagttgatgattgggcaaaagctctattagaagaggaaaaagtggctcttgtaccaggtacaggatttggtgctccaaataatgttcgtttatcatatgcgacatctcttgaacaagtagagaaagcattagagcgcatccatacatttatgaaaagtaaagtgcaagcttaattttatatttcattcatgtaatataaaaaacctccctattaatggggaggtttttttgacggattgtggcaaaaagaaatagctaaaggtgtgttatactagagagcgaggtgtttggtgatgaaaaagaaaatgatgttacagtggtttgagcagggaagcattgcaattccaaaattgcttatgatgcattataaaaaattaggtttaaatgagacggaatttatggttgtacttcatgtacacacatttttagaatcaggtaattcgtttccgactccttcagagatttctgaacggatgacgataacggaaatgaaatgtatggaagtaattcagacgttgattcaaaaaggttttttatcactagaaggtggacaaagatcagaagcgatgatgtgcgaaagttattctttacaaccgttatgggaaaaaatattacatttcttaatggatgaatcaatagaggaagagcaaaaagaaaaaaaacagctacaagtaaatttatatacagtatttgaaaaagaatttggaagaccactttcgccgttcgaatgtgaaacgttagggatgtgggaggaccaagatcaacatcatccaaatttaattcaagcggctcttagagaagctgtaatgagtggaaaactaaatttccgatatattgatcgtattttatttgagtggaaaaagaatggaattaaaacggtagatcaggctcaaaatcaaggtcaaaaatttagagcgaatcaacaaagggcacaacaaatgacaaaacaagagacgaaatttactggaaaagtgcctttttataattggttggagcagtaatataggaggaaaaatatgcttaacaaaacgcaaatccgttattgtttagacacaatggcggatatgtatccagaagcacattgtgaattggttcatgataatccatttgaacttgtaatcgcggtggcgttatctgcacaatgtacggatgtacttgtaaataaagtgacaagaaatttatttcaaaaatataaaacaccagaagattatttaagtgtttctctagaagaattacaacaagatatacgctctatcggattgtatagaaataaagcaaaaaacattcaaaaattatgccgaatgttattagatgactataatggagaagtaccgaacgatcgagatgaacttacgaaattaccaggtgtaggaaggaaaacagcgaatgttgtagtttccgtagcgtttggaattccggcaattgctgttgatacacatgtggagcgagtgagtaaacgattagctatgtgtagatggaaagactctgtgttagaagtagaaaaaacattaatgaagaaagtaccaatggatgagtggggagttacacatcatcgtatgattttctttggacgttatcattgtaaagcacaacgaccgcaatgtgaggaatgcagactgttagaagtatgtcgtgaaggaaagaagcgaatgaaggtgaaataaaggatggaacgagttatagaaataccgaaagaatttcactgtttaccattttttaaagaaagtgtaaatttaattaagtatcatacagacaattcttttgaagagataatacaaaatacttactttatatttgatattgaaagacagtatgagccatggaaggaaattgaaaacagcattccagtgatgttgaatgtatggaaaaataagcatgaagacattgctatactgtttcgaaatagaaataagcaagaggctgagggaccaatgattctttttgcagctcacttgttatcggttgtctattggctaaatgaacaacctgttcatagtttgaatgaaatgcaaataaatacgaataaattaaaagtgcaacctgttaattttatggaaagatattcattcattataaagaaaccgagtaattatcattcttatattcaattagcgcagttgtatatcgaaatagaaaagctgtatgtaaagaaaatgataacaaaaaagaagtccgcttctcgttaagagaaacggacttctttttttgtatattaggactctgttgtaacaacagcaccgtctgcgtgaggtgtatctcctccgggattttggtgttgctgttcttgttgtttcttagcctcttcttcagcttttttcttggcctcttcttcagctttcttcttagcttcttcttcagcttttttcttagcttcttcttcagctttccttctagcttcctcatcagctttcttttgagcttcttcttgctgtttacgttgttgttcttgctgttgctgttcttgttgtttcttagcctcttcttcagcctttttcttagcttcgtcttgttttactttatcttcattagcctttttctgggcttcctcatcagcttttttcttagcttcttcatcggcctttttcttagcctcttcttcagctttttttgcatctggagttccgccaggcgcagtgaaggatgcaccaactgctgggcttgttccagtgccttttttcgctactacagagaagctgtaagtaacacctggtttaataccaccaagagtagctgtcgtaccacttattgataggctaccacttgaaccgtcagttgctttatagctggctgcatatgcatcaacttctgctggtccagaccagtttagtgtaactgtgctagcgccatcaaaagtgacattcagaccactaggagcatctactttaatttgtttaattgcatcttttttcgcaccttttacgtataactctccgtttatttcttgtacagaagaaggacgttcaaagcgtgatttatctgtagcgaatttgctcatcattacttggaacatttgctgtgcaattctagtggagcgatcgctaacataattttttggaccatctttttcgtaaccggtccaaacagccattgtgtattgtggcgtatatccagcaaaccagctatctctgtttgcatcagctgggatgtcatatttttgaagaactgattcatcaaagttttgtgttcctgttttacctgctacgtcaacacctgaaacgtatgctgttggacctgtaccaccagaaccaggttttactacgtcacgaagaacgtcagtaaccatataagctgtatagtcttgcattgcgcgatgttctttcggtttaaagcttttctttttcccgtccgggaaggttacttcttttacgaagtgtggtttattatagttaccactattaccaaaggttgcatatgcacctgctacttctaatggagaactatcgttactaccgattgctgttgattcgtagacttttccttctttaaaggtcatgcctaaaccttcagcaaattcttttgacttattaagaccaactgtttgtgctgtctttaaagctggaatgtttaatgattttttcaaagcttcacgtagtgaaacgtcacctttgtaactctttgttgcattttgtattttcttaccattggaatacgtatactctgagtcgtttaattgatggtatgtagaccattgtaaattttcaattgccggaccgtagtcgaaaattggtttcattgttgaaccaacttggcgttttaaatcagttgccatattatgacctttgaaagtagacttactttctttacgtccagcaccaattgctcgaacttctccagactgtgtatccataaatacgaatgacccttggaattgatcgtccggatacttaataagattgccatccataattttgtcggcgtaatcttgagcatcttgatcaagtgttgtatgaatcgttaaaccatctgaaccgatatttacatcaggatattctttttcaacttcttttacaactgcatctaaaaatgcttgatacttcatctcagttacttctgaagacggttgaaggccctcagttactggaatcttaacggcgttattcatttcttcttttgttatataaccatgtcgattcattaatgataatacgacattacgacgatttgttgctcgttcaacattttccttttttgttggatcataaatgtttggaccttggggtaaaccagcgagcatagcagcttcatgtaattgcaagtcttttaaatctttaccataatatttttgcgctgctgtcgcaataccgtatgaacggttacctaaattaatcttatttaagtacatttctaaaatctcatgtttagagtattgttgctctaatttgtaagataagtaccattcttgcacttttcttttagcagttttgtccatcgttagaaagtagtttttaacgacttgctgtgtaatcgtactaccaccttgggaaccgaaaccaccagtgacattttccataactgcttttgtagttcgtttaaaatcaattccattatgatcatagaaacgcgaatcctcagttgcaagaaatgcattttcaactacttttggaatttgatcataagtaacatgtgttcgtttttcagcaccgtattcatagaagaaatttccgtttttatcgagaaactttgttgataaaggattaacaagtttggatttgtctaattttggagcgtcctttaccataacaaagaaagcggaaacgccggctacaagaccaacgataccaagaagtagacaacctataaggaatttcttgaaaaaggagccttttttctttggtttttcttctttatgtgtttttttctcttgatttttcacatgatttcgttctgtacgagaacgataattatctgacattatactttctcctacctttcattctctcccccaaaagtcgaaaaaagagccttagtgatgactctatcacgaaaaataaaccatgtctagtacacggatatagtcaatccgagggtgataaccgcatgataataaggatccatgctcttctatttcttctttcgtaatcgacttgcgtccaccagtattttgacgattccaaaatgcaataatatgttttgcatctagtaaataaaattcatcaaaaagtgtaaatttaataataacaaatgcaattccattatgagcaacgacttgcttcatatgttcaatttgatgaaggtggaagttttgaagtgggaaactagttttatttttggtttcctttgcttcaaaatcgatgtatttccctttgtatacaccgttgtaatctgttgtagaaggttgtttaaaatacgcttcttttaccactgcagcacttcgagcggggtaatctacttttacaatttgaagaggtgtaggctttttatgtacacatgcaatattatgggttaagtaatattgatttgtttcattcaattcctcttcaagggacatacctctattactataagtatgtgtttttataggtgttttttgaggttgtgaagcttgattatacctttttccatttgggtaacgaatggtcatagtgtgtccacccccaacttgctaagaattacttacaaaggtgattatatcaaaaaatgaaaaaagatgtgacctttttgatgaaaggtatgatgacttatttatgtttacatggaatgattatatgaaaattaaacaaaatcgagaaaaaaatttttgtgcagaggaagaaaaagcaatcattcacaatattaaaaagaaaacagaaatagctaatgtggacaatatttctcggacacaatcttatcaagaatattatttaagaaatagtgaaatcaggtgggcctttttagcgagtatggtttcgagaaatgcgggctggaatatgactgatttagaagggagatattatgctactgttttacctagaacggtaaaaaaacatttatttcttctgtacgaacaggctaattggattatttttttagatgcatttcctcagctattattgtatgaggaaagtaagaagagacatgcacctctctttcatttgttgcaatacttcaacgtatcaatttttatggaaaaagaatggttacttttctgggaaagaagagatacgaatagacttatgacagcgcttattataaatgaacaaaataaaattcaaaaaccagtcattgagaatacatattttaaaaaacatgtattccatactgcactttttaaagtacaagaaagacttcatattagtgcagttatcttcccaacaattgaagggagaatgtatgggttttcggtttatcaatttgaaacgttacaaaagcgtatagaactaggaaaaaaattagcatggttattgtttcatccaatttataatggttcgttttataagtttgcactgcaaactacacatactgggtctagagaagattatgaagtttacgcaaaggaaactcgaaagtcttatacgccaacacttagagatatttatcctgttattttacatgaagaaataaaaatgagagattggttttgtgcaaatatgaaaatgaatgtgctatttgtacttgaagaacctaaaggggaagttaatataacagaatggtatagaagaaagagagaacaaatctataggctatctatcgtaaaccgttttgctaaaaggatcgatgagttcatgatataataaaaaagaagtcccgtcttccattttgaagacgggacttcttaatttgaaaaaatcctgctatgcgtgctacaactttaatttcaaaacgtaatgctagtaggagattaaggatgatttgaaatttaaatgttcgtaataaagtctcgctttatgtagcagggaagtttggaccatctagctttggattgccagtctcgggtttattttgttgtttgttttggtttttctttttttcatttttgttctttgccattgtaatacacctcctttttgtattgttaccatttctataaatgacatacgaaatgatttctttgacgaataacaactagttttgtcatgtgggcaggagtggtgaatcatccggcgaaattacatgacaaaggaaaagcaaagaaggaggcgttttgtatatggcgatggttcagaaggaagatgtaatgaaaaaaatggatcaaatgttaagttctctcgatttgctggaaatgaatatagggattagaatgaatcatgcattaaaggatgcgagtgaaaaaatatgtaataagatagaaataacagaaatgcatattgaacatatggaaaataaattagtgcatcacgaagaaaaagggaattgggtgaagacatttcaaaacgtcgtagtgagtgcataataaggtgggaaagaaatgaagaatgaagcattaatacagtcttcagaaaaactcatgcagtatagtaatgaagcgaatgtaaaaaaaagagaactaactgaatacgatttttataaggatatgaaaccgtttgtagatatggtagatgaggaattaaagaagtggaaagaattagcttatacgtggattaaagaagaaaagccaaagtatatacatgtacagcaaattgatcaagtatacgataatttacaaacgaatgtgttgcaatgctttgtaaataaaggtaaaggtaaacgattctttgaaacacaccaagccatttcgtatactttgcaaaatatagttgagcaatgtaaataacaagagggagagccctcttgttatttttatgcttctgtcattgttgtaggttttgttgcgccgtttatttctaattcttttattaatgttcgataatctgatatgcatatttttccttcgagataccaatgtctcgcaaagtctaataattcatttgcattctctgtgcaatacccctttttttgagaaaacgcttgttttaaatcccctaataccatgttgattcctcccccatgagaatcttcttcttaattatcatagcatggaagggttttcttttttaattttttaaaaatttaaacttccgacaaaaatagacatatattccatcacacatattattttataggtacatattatatatgtagaaacttatgtgaaggaggagagaatgcatgtttcaacaacctaacgtatatcagcaaacgaatccatatgcacagcaaaatatgtaccaatataatacggatacatatttacggtataatatgtatcctttcgagccttattatggaaatcaaaattattatcaaccgtttgaagtgtcctttatgaatcaagctcaacaaccacaacagcagcaaccttatgtgaatcaagctcagcaaccatacatgaatcaaccacagcagcagccttatatgaattcgcaatattatatgccaccaccatcgccgtatgctaatcaacaagcgatgttttatccaccaaaacaaccgtacccgacgcagggtaagcaaaagcaacaacagccaagccagttttctagttttgtttctcaatttaaaacatcagatggtaactatgatgtaaataaaatgatgaatacagctggacaaatgatgaatgcgatgaatcaagtgacaggtattgtaaagcaagttggaggcttttttggtaagtgatgttgaaggattgtctataaaaacaatgtaaatgaaataaaggactagacaaatttccttgtaataaatgggtatatataacaaacggctttctctcttttctcatactgtaaagtgtaatcagatttttttaacgagagaggagagaaaaaactatgcatcattgtcatccttgctttggagggcataagcctacaggacctatttgtacgactgctcctgtcattcatccgacgaaacaatgcgtaacacactctttttcaacaacggtggtgccacacattttcccaacacatacaacacatgtacatcatcaacaaattaaaaaccaaaacttcttcccgcaaacaaattcaaatgtaaatgttgtggacccaatcgacccaggattcggcggcggatgtggaccgtgtggccatggtcatcatggacatcatggacatcacgtatcaccatttggtccaggaccaaatgtatctccgtttggaccaaacgtatcaccattcggaccgaatattggaccaaacgtatcaccattcggtccaaatatcggaccaaacgttggtggaatgtttaaaaagtaaatgatatgttagaactagcgaaatgctagttctttttttgtaattggagtgttgatatgaaagttattgcagtaacaggatataagccatttgaacttggaatatttaaaaatgatcatccaggggtggagtgtataaagaaagcgttacaccgtaaattaaccaattttgtagaagatggtttagagtgggttataataagtggccaattaggtgtagaattatgggctgctgaagttgtttttgaaatgcaagtagaatatccagatttaaaattagcggtattcactccgtttttagaacaagaagaaaattggaaagaagataatcgtgaatattatgaatttatcctttctcaagcagaccatgttgatagtatcacgaaacggaagtatgaaagtccagagcaatttaaattaaaaaatcaattttttattgaaaaaagtgatgcgcttttagcggtatacgatgaagaaaaaccaggaagtcccaaatatattgtagaagcagcaaagaaaaaaggagaaatagaaaattatcacagttatttcattcttttttctgatttacaagatataatagaagaggaacagtggaataatgcagagtaaatatgtaatatagtactcgtatatatgattgacaaaaagcattgtttctgaaaaaatttagttaatgaaagttttggtaaaaatttgaggtgaagaaaatgatttcggataaaattaaattaacagcgaaagatattttagaaaaagaatttaaaacaggtatgagaggttatcagcaagaagaagtagacaagtttcttgatatgatcattaaagactatgaagctttccacaaagagtttgagcaattaaagcaacaaaatgctcgtttaaagcgtgaattagaggaacaaaaactagcagtaacgcaagttccacaacaacctgtacaaacaccagttgcacaaccagtttataacaacacgaatacggatattttaaaacgcttatctaacttagaaaaagctgtatttggaagtaagttatacgaatgatgtaaggtgggaaaaggtttaagcattttacatagaaaaaaacgttgcaaaatctttttgtttccactatactaatggatgtcataacgtttgggtaatcgctgcaacgccaacgttgtagaggaaagtccatgctcgcacggcctgagatggctgtagtgttcgtgcctagccaattcataagctagggtattctggctgtaaggctggtttaacggcagggaaaaaacctaagtcctttcggatatggtttgactacctttaaagtgccacagtgacgaagtccttgaagaaatgataggagtggaacgaggtaaaccccacgagcgagaaacccaaataatggtaggggaatcttttccaaggaaatgaacgacgggaaaggacaggttttataacctgtagatagatgattgccaccggagtacgaggcgtgggccgtttgtagtacaaaggaacagaacatggcttacagaacgttatgaaccaactatgaaataactcagctctcctttgttagaggagggctttttatttgtatgaagttataaagtatgagttaaaatggttaatgagaaaaattttcgtaaaatgtaatgattaataggaccaattgctattaattattgtttgaatatacataagaggtgaatgcaaatgggaaaagttactttaattgcaacagcggcaatgggtattgaagcgttagttgcccgagaagttcgcgatcttggttatgaatgtcaagtagaaaacagcaaagtaacatttgaagcagatgaaaaggcgatttgtcgcacgaatttatggttacgtactgcggaccgtgtaaaaattaaagttggcgaatttaaagcaacaacatttgatgagctatttgaaaaaacgaaagcattaaactggggagattatattccagagaatggcgaattccctgttattggtaaatctttaaaatctgaattattcagtgtttcggattgccaacgtatcgttaaaaaagctgtcgttgaaaaattaaaaacaacatataaacgtacaacttggtttgaagaagatggtccgttattccgtatcgagattgcaatgctaaaggatattgcaacattaacaattgatgcgagcggtgttggacttcataaacgtggataccgtatggatcaaggggaagctccgttaaaagaaacattagctgcgtctttaattaaattaacaaactggaagccagatcgtccatttgttgatccattctgtggatcaggtacaattccgattgaagcagcattaattggacaaaacattgcaccaggatttaaccgtggtttcgcatctgacgagtggggctgggtaggtaaacaaaactggcgtgaagctcgtcaagaagctgaagatttagcgaactatgatcaacaattacaaatcattggatccgatattgatcatcgtatgattcgagttgctcaagataacgcagaagaagtaggcttgggcgatttaattacatttaaacaaatgcaagtaaaagatttcacaacaaaagaggattatggctacgttgtaacgaatcctccatacggagaacgtttaagtgaaaaagcactcgttgaacaactgtacaaagaaatgggacaagtattccgcccattagatacatggtcagcgtatgtattaacaagctacgaagcatttgagaagtgttacggaaaagatgcgtcgaagaaacgtaaactgtttaacggatttatccgtacagattactatcagtacttcggaaaacgtccaccgcgtaattcatagtataaaactcctccagcgcgcatatactggctattatgtaatgcgtaaaggaggaagtgatatggataatttccaattatcaatgattcaaaaagctattcaccgtacgtatgatgagctcggaaaagaagtggatagtcaagatgcgattgtagatgaaatacaaaaagcacaagaagaatatttgtcagctctttcacatgaaacagcgattgataaaaggtatttaaagtcattaatatagaagaaaattttcctttttcgaaaggaaaattttttttcgtgtatttatatgtatggcaacaggagaaagtagctgcacacatataagtagcggttactatatctttttatagaaaaactttttggttggaggctaaggatgtttactgagaagagattaccatttgaagtaggaaaacaagacaatttttatgataagttgaatgagtggattggagatgtgttttacgacatccttccggaaaaaggttttgaagagcgtgatgaacaaatttttatggcgtttcaattagagcgtgctttccaagaaaagaaagttatgttcgcagaagcgggtgtaggaacagggaaaactattgtatatcttctatatgcaatttgctatgcgcgttatactggaaaaccagctataattgcttgtgcagatgaaacgttaattgagcagcttgtgaaagaagaaggagacattgcgaaattatctgaagcgttaggcttatctgtagatgtaagacttgcgaaatcaatggataattatttatgtttacgtaagcttgaagatgttatgagtggacgagctccagaagtaattgaagacgtatattatgaattaccacaattcgtatttgatcatggtacgatgcaaaactttactcactatggtgaccgaaaagaatttccactattaaatgacgaagaatggtcaaaagtaaattgggattacttccaagattgcttcacttgtgattctcgtcatcgttgcggtcaaactctttcacgtgaacattatcgtaaagcagcagatttaattatttgttctcaagatttttatatggatcatatttggacgtacgatgctcgaaagcgtgaaggacaaattccattattaccagaaagtagttgtgttgtattcgatgaaggacatcttgtagaatatgcagctcaaaaagctttaacatatcgtttaaagcaaacgatgatggagcaacttttaacgagattattacaaaacgatattcgtgaagagtttgcacatttagtagaagaaacaatttggcaaacagagcgattctttgatgtgttacaagaaaacaaaaaagaaattgccggttctgatcgtttagaaattactgtgacagaaaaagtaacagctgaagcaaaacgactttatgcgaaaattggtgaagtcggtgatgcgttagtatttgaaagtgaaatgcatacagtaaatacgtatgatttaaatatcgttgatgaacatttagatgtattagaacattcacttcgtctattcatgcatgagaaaaatgtaattacatggggtgaagaaggtgatggagccttcacgttagtaattatgccacgtgcagttgaagaagtattacaagagaaagtattctcgaagaaaatcccgtatatcttctcatctgctacattatctaataacgattcattcgcatttacagcaaatagcctaggggtaaaagattacttatcattctcagttgcctcaccatttgattatgaagagcaaatggcagtaaacttactatcgcatacgaaagaaaatgagtgggaaagaaagtgtcaatatacacttgaaaatatacagaaaacaaacggacgtacacttgtattattccgtacaacgcaagaacttgcagcgtttaaagaatatgtaagtaaagaacaaatgtcagttccgttcttatatgaaggggatcaagaaattagtcagctcgtttctcgtttccaaaatgaagaagagactgtactttgtgccgttcatttatgggaaggtttagatattcctggttcatcattatcacatgttatcatttggtcattaccattccctccaaacgatcctgtgtttgaggcgaagcgtaaacatgtaaatgatccattctgggatgtagatgtaccgtatatgattttacgtcttcgtcaagggattggccgtttaattcgtacgagcgacgataaaggtgctatatcaatcttcttatctgatacagaagatgagaaagtggtagaagcggtgaaaaacgtactaccggtagaaggtaaagaattataaggagaaagcttggcgcttgccaagctttttttctattataaaaggaatttagatttccgtgtcgaattaagtttgaggtagaaaagggaggtttttatacgatgacagtagctacatatgaagtagaaaaacaatttttaacatatgtgaagaagatacaaaattacggagaagcattaagtttaatgttttgggacttaagaacaggggcgcctaaaaaaggtgttgatcaacgttcagaagtaattggtatgctttcatccgaagtgtttgctatgtcgacttcagatgagatggggaactatttaacagagcttgaagctttaatacgtgaagataaactttctgaaacgacgaagaaaatggttgaagagtgtcggaaagaatatgatagaaataagaaaattccacaagcggaatacgaagcgtatgtgaaattagaagcgaaagcagagagtgtgtgggaagaagctcgcgaaaaatctgatttcgaaatgttccgcccgtacttagaaaaaattgttgaatttaaaaagaaatttattacatattggggttacgaaacatataaatacaatacattattagacatgtatgagccaggtattacagtagaagttttagatcacgtatttggtcaacttcgtgagcgcatcgtgccgcttgtaaaagaaatctctgagtctaaaaaaggattaaaaacaagtgctttatcggaaaatttttcaaaagaaaaacaaaagaactttacattagaactattaaagcaattgaattatgactttgaagcaggccgtcttgatgaaacagtacatccattcgagattacattaaatagaggggatgttcgtattacgacacgctatgacgaaaaggatttccgcatggctgtgtttggaacaattcatgaatgtggtcatgctgtatatgaacaaaatatttcagagaaatttgaaggtacaccgttatgtagtggaacatctatgggtattcatgagtcacaatcgttattctttgagaactttatcggccgtaataaatcattctggaagaaaaattatgatttattaaaagagtatagcaatggtcaatttgatgatatgtcagtcgatgaattttatgatgcaattaacgaatcgaagccgtcattcattcgtatagaagcagatgagcttacatacccgcttcatgttatggtgcgttatgaattagagaaagaattatttgatggtacattacaagtgaaggacttaccagcagcttggaatgataagatggaagcatatttaggaattcgtccggaaaatgatgcgcaaggtgtattgcaagatgttcactgggctggtggctcatttggatacttcccatcttatgcgcttggttacatgtatgcagcgcaatttaagcaaagaatgttaaaagacattccgaactttgatgcattattagaagaaggaaacgtaacaccaattcgtgaatggttaacagaacatattcaccaatatggtaaaacgaaaaagccacttgaaattttagaagatgtaacaggcgaagggttaaatgcaaattacttagcagattatttagaagtgaagtataaagaaatttatgagttataaaaaagagctgcttacttgcagcttttttttatagggggatagaagatggtttatacatatacagtaatgacgcaagaagaggcggaagagattgcatataactggcattataaaggggaatattccttttacgatatagaggcagatgaagaagatttagctgagtttttagagggtgagagtagagggaatcatgtattttctgtgaaagaaaatggtactctcattgggttctttacggtttgtaaaataaataatggaacggttgatataggacttggaatgagacctgatataactggcaatggatttggtttacagttcgtgaatgctggactagcttttagcaaagaaaaatacggatgcaaatatataacactatcagtagcgacatttaatgagagagcgataaaagtgtataaaagggcgggatttgaagcggttggaacgtttatacagaaaacaaatggtggttgttttgagttcttgaaaatgaactatatatgtaaacgtgattaaaaaaacagagggatcttctgtttttttattttgatttagaaatatatgatacatattttttactttttgtaattgagagttttgaaattttggtagagggtgtgtatgatagaagtttagtagcaaatagtaggtttagcaaggaagggtagaggtagtatgattacaattaaaacgaaaaatgaaatagatttgatgcatgaatctggaaaattacttgcttcatgtcataaagaaattgcgaaaatgataaagccaggtataacgacacaagagattgatacgtttgttgaaatgtatttaaaaaagcatggtgccacatctgaacagaaaggttacaacgggtatccatatgcgatatgtgcatctgtaaacgatgaaatgtgtcatgcgtttccggccgatgttcctttaactgagggtaatattgtaacaattgacacggtagtaaacttaaatgggggtctttcagattctgcttggacgtatagagttggaaaagtttctgatgaagcagaaaagttgttgttagtagctgagaatgctttgtataaagggattgatcaggcggtaattggtaatcatgtaggagacattggctatgcaattgaaagttatgtaacaaatgaaggtttttctgtcgcaagagactttacgggacatgggattggtaaagagattcatgaagaaccagcaatttttcattttgggaaacaaggacaaggacctcagttacaagaaggaatggtaattacaattgaaccgattgtaaatataggtatgcgatattctaaagtagatttaaatgggtggactgtacgaacgatggacgggaaattatcagctcaatatgagcatacaattgcgattacaaaagatgggccaatcattttaacgaagttgtaattgggaatgaaagagtttgcaaaactcgaacgaaaatagtggtttttaaaaatttgtacgtgtttttttgataaatgcttttcaaagcataaaaagtacgttataatccttctataaaataaatagttagctacactcatataatcgcggggatatggcctgcaagtttctaccgaagtaccgtaaatactttgactatgagtgaggacgaatataattgcttgtttagcattctttttttgcgaaactccaaaagcgcgtctctcacttgtaacgagtggtggcggcttttggagtttttttattgcataagagggggaacaaacatgaaagtattacaagaaaagattttgaacgaaggaaaggttttatctggtgacgtattaaaggtagatgcttttttaaatcatcaaattgatccagtacttatgcaagaaatcggaaaagaatttgctaaacgttttaaagaagagaacattacaaaaatcgtgacgattgaatcttcaggcattgcaccagcagttatggctgcattagagcttggtgtaaaagtaatttttgcacgaaaacgtaaatcgttaacgttacaagataatatgtacgttgcaaacgtatattcatttacaaaacaagaaacaaatgaaatttcattatctcgaaatcatatcgatgaaaatgatcgtgtattaatcatcgatgactttttagcaaatggtcaggctgctttaggtttaatgagtttagtagagcaagccggagcgagtattgcaggaattggaattgttattgaaaaagcatttcaagatggaggaaagaagcttcgtgaacaaggcgttcgtgttgaatcactagcagaaattgcatcacttgataacggcacagttacatttgtacagcaagaaactgcggaggtgaaataaacgatgaagcagcatccatttaaaattgcatcgcttggtatgcagcatatgcttgcaatgtatgctggagcaattatcgttccgcttattgtgggcggtggacttggtttgaatcaaaaagagttaacatatttagtctcaattgatttattaatgtgcggcgttgcgacaattttacaagcattatcaaatcgctttttcggtattgggcttccagttgtgcttggttgtacatttacagcggttggaccaatgattgcaatcgggaaacaatacggcgtgtcttctatttatggagcaattattgctgccgggttattcgttgttatttttgcgaaattatttggaaagcttgtaaaactgtttccccctgttgtaacaggatctgtcgttacagtaattggagttacacttgttccagctgctattaatgatatggctggcggagtaggaagcaaagatttcggaagtcttgaaaacttagcgttagcatttggtgtgttactatttatcatcattatgtatcgtttcttcgacggatttattcgttcaatctctattttgctaggtttattgttcggtacaatcgttgcagcatttatggggaaagtaagcttgcaagcagttggagaagcagattggttccatggtattcagccattttacttcggtacaccaacatttgaattgacgccaattattacgatgattttagttgcttgcgtagggattgtagaagcaacgggtgtatattttgcattatctgatatttgcaataaaaaaatcggtgaaaaagaattaacaaaaggctatcgcgcagaaggattagcgatggtgttaggtggcattttcaacgcgttcccatatacaacatactctcaaaacgtaggacttgttcaattaactggagtaagaaatcgcgttattatttatacttgcggtggtatgttaatcgtacttggtttcattcctaaaatcgcagctattacaacaattatcccaaaatcagtactgggcggtgcgatgttagcgatgttcggtatggttatggcatatggtattaaaatgttaagtagcgttgattttggtaaacaagaaaacttattaatcgttgcatgttctgtcggaattgggcttggcgtaacagtcgttcctacattattttcacaacttccagaaagcattcgtattttaacagataacggaattgtacttggaagtgcgtcagcagtacttttaaatatcgtatttaatatggtgccgcagcgcaaagtgaaagtagaagaagagccagtatctatgcaaagtgcagtaagagaagcgtgaaaaagcaaggtctcgttatgagaccttgcttttctttttaagtggcattattttcccgtacgtaccaagacgccaaatgtactcaagtggcccgtattggtaatgtgaaagccaccagcggctaataaagatttgtaacgtgtagaaactaatgcagaatattggtccaacccataatggagcaggataataatttttaaggaatagaccaaatacaagtaatgtaacaattgtatgcgagatgtaatttgttaatgccattcgtccaacgtattggaatggacgtaataatgtttgccatttttctttttgtaataaacgcattagcgtgaaaatgtagaatatgaataacgtttttccgctaaacattgtaaagacctgcatataaattggttcataaaatggttttgataagaagtaacggaccatgaagaaccacattggtaatgttaaaaggaacataataatttgccattttttaagttttggatctaactctttcgtgcggcggaaaatatcctttttgccggcgtataaaccaagcaaaaatagcccaactgtttctggaagcataagtaaatttaatccaattccatcagcgtaaaatgcatggaaacgattttgtatttgtgacagccagtcttctaatggcatgataggtaaggaaaaacctagctcttcctttggtaccaatgcaaccgtaataccagccattagcataatgaattgaaaaatactcaataaaacgatagcccatattaaaatagtacgaggttctctcttataaaataaaaataagaaaaatccagcaatcgcataagtatgtaaaatgtcaccgtcccataaaagaacgtaatgtaagaaaccgaataataataaaataagtaagcggcgaacaaacaaagtttttgggcggtcggttttcgcctcagcacgactcataaaaatataaaaacctaatccgaataaaaacgaaaaaattgtataaaatttcgtttgaataaacatatcgtaaaataggcgaatatagctgtctatcccttcgtaaattcctgaaagatcacgtgagtcaaccccggcgataacaggccaattcacaagaaaaatacctagtacagctattcctctaataatatcgatggagtgtatcctctcgccatgtgtgagattttgcgtcatttttttcctccttgttaagtaattcccttttattatacaaaatgtaagatggaggggataggcgatatttccatttttttaaactgttaagttatgtaggataagatataataagagtgcacaataagttttaccctttttcaaaacaggcagtaaagctccttcttataaggagctttctttatgaaaagtgttgataatgattctctttaatgataaaatatatttaaaattgataatcattatcaaaaaaggttggtgcgtaagtatggtatatacattagtagcaggtacagtcgctgtatatgcagttattgcgaagtatgttttaaatggagtaggaacagcaaaatgagtgatatgacataaaatccctttcatttgtaaaaagaatgaaagggattttttatttttaatgagaatatgctgaaaatttagtatgatagtaaagtgaaactgtaatcaatgggtaggtgtaactctcactggttatgagctcgcaattagcgggaaaaagtatatacatcttggataaaggggaacaagggaatgacaaacatagtacagacaaacggtatgaaaaaacttgtttgtttttatgaagagtggcaaaaacacggcgatgcagagaatagtttaaagttgtttgaggtgattcaaaaatataaacaagaacagcttatgatagcgttctgtggtcacttctctgcggggaaatcaacgatgatgaatcatctatataaagcgcagctgttaccaacaagtccaattccgacaagcgctaacgttgtcaaaattgaaaaaggaatggatcgtgttgttgtaacggttaaatctggagaacagtacgagtatgacggtgcatattcagctgaagaattaaaacaaatttgtaaagatggtgatgaggtaattggtgttcacatttatcggaatgatgcgccaattcctgaaggtgttatgttagtagatacaccagggattgactcaacagatgatgcccatcaattagcgacagaatcaacgctacatctagcagacgtaattttttatatgatggattataatcacgtccaatcggaagtgaatttgcaatttgttaaagaattgaaacaacgtaataaaacggtttatctcgttgtcaatcaaatagataaacataaagaaaatgaattgtcgtttgagaattataaagatagtgtaaagcaatcgttctctaactgggatattgaagtagatgaagtatattatacgtcattacgaatgatgaaccatccacataatgaaattggaagcttagaaacgttaattacatctatcatgaaagaaaaagagcggtatgtaagagagggaatggagagagaaacagaatatttaatgggggaacatttctcgtttattctttctgaaaatgaaaaagctcttttgaaatatgagaaagagttagcatcaccgctttctatttcagagatagttgaaaagaaagcggagctaatggaaacgaaacgtcgcgaggctagtaaagagtctcatgtgagaaatgaatttataaaaggcctacaagctatattagataacgcgtatttaatgccatttgaaatgagagaattggcaaatgcgtacttagaaacgaaattaacaaagtttaaagtcggtttgctatttgcgaaaggaaagacggagcaagaaaaacaaaggcgtgtagaggcgttttattctgcccttcaaaagactgttgaaacgcagcttgattttcatgtgaaggaatttattgtagccttcttaaaagaagaaggattgttcacggaggaaattgggaaagacatatatgggttagaaattgctttcggaccagaaatgttggctgaggtaattaaacaaggcgcaggtttcacaggtgattacttacttctttatacagcggatgtagcgaatgaactaaagaagcgttattttataaaagcacagcaaatttttgataaaagtgcggtcgttttaaagcaaaaggtgagggaagcagttgctcgtattgaagaagagattgaaacatatacgatgttgcaaacggcgaaagaaacacaattacaatacaataacaatttggtggcatatgaagactatttacgaaatgtttggcacgatcatgttgctacgcctgaaggtttgcaaatagatgagatattgcaaagggaaaagcaaattgttagtgagaaatttacactacaagagcaggaaatcgtaaacgataacgtagcgattcatgaagaagagctgaaaggaacggcggctttaaatattcagcggatattagagaaagtgaaaaaagctgaaacgatattagagccattgccagcgctgaaacatgtacagcaagaggtaatagagaaaagaagacgtgtagaaacaaaacaatttacagtagcgttattcggggcatttagtgctggaaaatcatcatttgccaatgccttactcggtgagaaagtacttcctgtatcaccaaacccgacgacggcaacgattaatcaaattttgccggttacagaggaaaaaccacatggaacagtaattgttcagtttaaatcaaagcaagcgttattagaagatatgaaagctgtttataagctgtttcattatgagattgctacgttagatgaagcgttagcacaaattgataacgttatgaaatatccttcaccaactgggaagcaaaaaacaacatttagctttttacgagcggtacaaaaagggtatgatgcagtttctacttatttaggagaacaagtacaagttacattagaagagttctctgattatgtagcgaatgaagagaaatcatgcttcgttgagtatatggaactttattatgattgtgctttaacaaggcagggagtagcgcttgtagacacacctggagcggattctatcaatgctcgccatacggatgttgcattccagtatattaaaaacgcagatgctattttatttgtaacatattataaccatgtattctctcgtgctgaccgtgaatttttaattcagcttggtcgtgtaaaggatacttttgcccttgataaaatgttcttcttaattaatgcggcggatttagcagagtctgaagaagaacttgaaatggtaaaaggttatatcgcagatcagctactacaatacggtattagaaatccgcgtttatttgcaatttcaagtttatgtgcgcttgaagagaaacaaggaaagaatgttgaaaaagagaagtatggtattttacaaaactctgggattactaagtttgaggaatcatttacgtcctttatgatgagagatttaatgcttgtttctgtgcatgctctatatggtgcgttgcaaggggcagatcagcttttagtaaacatgataaagggtgcaaagcaggggaatgaagagaaagagaagcaaacgaaaaaatatgaagcagagcgtgatcaactacttcatatcatttcttcatatagtgtacttgctgaagaacaggcgatgcaaaatgaagtgaaagagttgctttattacgtgcaacagcgtctattcctccgctataatgatgtgtttactgaatttattaatccggcatcacttcgaacggatggaaatgtgaaaacacaattgcaacagtgtgttatggaattagtagcatttattcagcatgatttattacaagaaatgcgtgcgacatcattacgccttgaaaaatggatagacgaagcgatgaagcgtgcaaaggatgaaattgtagtgaactgtaaagtagaaaatgaatcaatttctatgaatggaacagtggagtatgaatacaaagatattacacataaagaaccgttcccttcagttgaaataaaagatttcaaaaaagcactggcacattttaaaaatgagaaaagcttttttgaaaagaatgacaaggcttttatgcaagaagacgctaaatctgtattagaaccgctcgtatcaaactatgtagctgatgaaaaacatttatttgttcatcattataagcaagagtgggatatgaagtggaatttattcgaaaaagtgatgcagcaagatgtgatgaactattatgaaagtatattgtttgcattggctgaaacgatcgatgtatctctatatgaacaaagtaaagaacaattgcaaaagcagttagtagagattgaaaaagaaatttatgttatatagtcgttatgagaaaaagattcgttcaattttcttttgaagtacagtatctaaagattttacaaatccagcaaattcatcggtagaaatcatatgagtaagaacgagtcgtctgccatctggtgtttcaccgcataagacgaatgaagaaaattcatatgttttgttttcaactactaattttggataggaatacgtgtcgcttttcttcttctttccatcaatagagatgacgttgcattttttctcattgttgtccatggtgaatccctcctttctattatttatggtagacaaggagggtttagaacaatagagaagggggaattttttatgtctgttgtaatagaacgtattccaaaagaggctataccgaaggctttattgttacttgctgatccaagtgaacggcaaatagctacgtatgtacaaagaggattaacatacgtagctaagcagggggggagcgttatcggtgtatatgttcttttggaaacaaggccaaagacgatggaaatcatgaatattgcggttgcagagcatttgcaaggaaaagggattgggaagaagctattaaggcatgctgtagaaactgctaaaggatatggtatgtcaaaacttgaagttggtacaggcaattctagtgtttcacaacttgctttatatcaaaaatgtggatttcgtattttttctattgattttgattacttttcgaagcattatgaagaagagattattgaaaatgggattgtatgtcgtgatatgatccggcttgcaatggaattgaataaaaacgtataactatttagggggaagagaagatggaagtacataaagcaattacagcacattctcgtaaacaaaatgaaagtgtaaaagcatgtttacaattagatgcacagcgtgaagcagctattgaagctgccgtatctcttgcgtcaaatgggaaagaattttcggttgatgtcattaatgttgtaacgaagcagattaatgatcttgcaaaaaatggtgttaccttgcagcgtaaatatgttacagaagaaatggttatggaatatgtaagtcgtttgaaagagaaagaaggtcgttaaagatgatagttacagtcgaatggttacgtgagcatatagaagatgagaatgtccgtataatcgattgtcgttttgatttagcgaatcctaattggggtagagaaaagtatgaagaaggacatattcctcatgcgttatattttgatttgaatttagatttatcaagtcctatagcagaacatggtggccgccatcctttaccaaatattgaggagtttgcagacaagctttcgaaggctggtattgatgaacatacgacagtaattgcgtatgacagtcaagccggtgcaaatgctgctcgtttatggtggttatgtaactatgtaggacatgagaaagtatatatattagatggtggtttccaggcttggaaagagaatggactaccgacaacagcggaaattcctgttgctatacgaaaaacattcaaagctaatatacaagatcatatgcttgtaacgatggaaacggtcagagagaatatccgtgcaggtgcggatgttacattaattgattcaagagagcccaaacgttatgctggtgtagaggaacttgtcgatcataaagcaggacatattccaacagcggtaaaccatttttggaaggatggaatgttgcaatcaggacaatttaagaataaagctgggcaacaagaacgattccaaaatctgtcgaaagataaggaaaccattgtatattgtggttctggtgttacggcatgtccaaatatcgtcgcattaaaattggctggattccaaaatgttaaattgtatgcaggtagctggagtgattggatctcttatccagaaaatcaaattgcaaaagaagaagattaatcacttgcatgcaaaaataatttgtattaaaataaggtcacaagcaagagattgctcgaaaaactttgtattttacacattggaaacaatgtgataatataacgacaagtaaataatacatcctgcggtgtgcgtaacttatttatgtctaaaaccgatgttagttatacggaagctcaatatttagcgaccatcatcaagccttccttgtggaggaagatgtacggtaactgtgagggcatccacctgcgagtagcgggtttttggacatttacgaggagcggcacgtgcgggggtcttatttcaactaaccttatataaaattcctacggtgtacgtagcttatgcatgtcttaaaccaataagtttaatatggaagttcaatatttaaatgtagctaacatgccatctttttaagaaggaagttacaaacatttgtgagggcatccacctgtgagagcaggtttatggacatctagagagaacggcatatgtggggctatataaaaaccttacgttttatacgtaaggtttttttgttgcatagatatattaatattatcttgattcacctgtgaagtttccgtaataaatgtagcactttctgtcttcatcagtctctcttgaatccaaggagaattccatagaaatgccgtctcgctgaatatatataatatctgaatgaagagatggtaaaatttcttcgtagttccatacatcttgactatctactaagcttgaacttgtttcacttagttctctaatttcaaaaccgatgtgggagtatgtagggtctgaagggtcattggcgaaaacttctttttgaatataaataactgctgttccgtctgggtcaaccgaagttgcagtaacaacataagtatttttctctttaataaaatattcacaagtcatgcgtgcgataatttcagaattagaaatattggcgtagttccataaagcaggataccctttcgtttcatcattaagtcgatattctaagcgcattttatacctcttcttcctttttcttctactttatcatgccatcctatataataggaatagaatttaaaaaggggagtgcgaaggtgacaaaaacgaaatggctagtaggtggtgtcgtaacgtctttaatgactggcactttatttggttgcgcacaagatcttcccccaaaaccgaatgataatagttgttctgattgggattgggatgatgaacttggggtatggcagtgtgatgatagtagttcaggttatcgtgggcattatttctatggtgggcgatactatcaaaataaatccacttttaaaaattcatcggcgtttaaatcgtatcaatcgtctactgaatttaaaggtggaattggaagcggttcaaagggaggatttgggggctaaaatatgtcgcaatacataagggatcgaaaagaattttatttaaaatatccgaatttttggtcggatttatatgaatgtgagtatagtttgtttcatgttttttctataacaaatcagactttggaccaattacacttagcgactgaacgaatgggcaaaatattttttaagactgctagactgctgcgtaatctaagtgacgaacagcttctagatcttggctttccatccccgagtttatcattcattagaatgaaagggctttatcctgaatctgtaatttcgcgatttgattttgctgtaacagaggataacaaaatcaaaatgcttgagtttaatagtgatacaccaacttttattgtggaatgttttcaaatgaatgggaaagtatgtgaaaatctaggctatgatgatccaaactcggatcaagaacgattgctatcttctggtctaacgaaagcagtaatggaagcgacaaagggattagataatccaaatgttgtttttacagcacatcatgaacatatcgaggattggaataccactatgtatttaagtcagctatgccatgttgaaaataaagtagtgccaatgtcagaacttagaattacaaaagatgctctagttgataaagatggggcgaagattgatgttttatatcgccaaacatatccgatagaagatttaattgaggatcaagatcctgaaacaggagatttggtaggtgtggaactgctgcaacttgtaaaagccggaaagctttttataataaatcctttgtcagcatttttacttcagccaaaatcaattcagtgtcttatttgggggttagcagaagaagaggtcttttatacaaacgaggaacaacagtggattaaagaatatatgttacctacatatttagaaccagatttatttttaggaaaaggttctttcgttcaaaaaccttcatttggtagagaaggagatacaattacgattcgcgataaggatgaaaatattatgcttcaaaatgcacatcaaacgtataaaactgcactgccgatatttcaaaagtatacagaactgccagtcgtatccttggaaacagaaaaagggatggagaaactgtcctatgtgtttggttcttttttaattgctggaaaagcgagtagtatcggtattcgcgcgggagaaaagattacaggaaatgaatcgtactatttaccggtaggtataaaaaggagggggaaaaatgattaattttttattatatttagcagtaacacttggacttttatgtattggtctgttcttgatggaagtgacaacgaaagttaaggaatttaagttaatggctcaaggtaataaggcggtaagctatgtgcttggagggcgattacttgggttagctatcgttttatattcgacagcagctaattcaatttcacttcttgatatgatttcgtggggagcagttgggattttggctcaaattatcgtcttttatttagctgagtggcttacaccacgctttaatataaacaaaagtctcgaagaagataatcaagcagtcggtctttttcttatgtttttatcgctttcaattgggattgtaatcgctggttgtataacttattaaaaactttacgtttaaacgtaaagttttttattttatcccgctatttgccgggcagcccgattggtgagggctaataatcagtggcggatgaacaaaacccccactgattaaagtttcactttatatacgttagtttgccataccatttgaaaaaattgtaggctacggttgacatctattttaaataagagtaacattttcaatgtaatgaaaataagtctctgttaggtgaggctcctgtatagagaaatgctactgcccaaaaatgtcgagagacgccaatgggtcaacaggaatgatcgaattaaggtttttcttaacgtagctggtaatgtacctatgctatacagtgctaaaactcggtgagggagaggtccgtagatttctaattatattagaaatcgtttatttgtgtatgtaatggccgctactctcttaagggtaggggtcttttttgttaccaagctatgagtaatttcatattataaactataaaattaaacgaggaggtgaggagcatgtcaaattctgactcggttccgttacccatatacttcaaatcaaaaatatatgatgtaggcaggaaacgatttgttcctccctctatatttatcacaatatagcgtttataaagcgcgagacactttcacagtaaagtggataaattgagaaacaaagcgtttcttcctatgttgtaaaggaggagacgataatatgttatatgcaaacaaaactgtgggtaacacgtcatataaactaagtaaaaaatcaataaaagaacaaacaatgctccaaaaaaataaagatttattaattgaaattgcaacaagagatgtaaaatctgtatttgcatattttaaaacaacaagagacggactatcaatgaaagaggcacaaaaacgtattcaagtatatggccgaaatgaactaacttcaaaaagagcacttcttgcagaagtaatgatgaagctaggtggcatgattccaggtttttcaaaacaacgtgtgtgtgatgaattacaacgtgaaacgattactgtatctagagtagaatgttctagtagtacagggctaaatagtgaactgaaaatgatggagatacctgtgcaagaacttgtacctggagatatgatttttctttcggctggagatgctgtgccagctgatgtacgtattatttatgcagatgatttattagtgaatgagtctgtgttaacgggaaacgaagcgaatatagagaagtttgagagctgctatcaccttgaacgtaaacggtttattccattaaaacggatgaaagattataatccacttgagcttgaaaatgtatgttttaaaggttcgcatattgttagtggaaatgcaaaagctatcgttgtttctactggaaaaaatacgtattcaggcatcttgcatacttgttgtagtagaacgtcttaatgtgttaatgatgctaaatatacaaaaacaatgtataatagacaaagttgagcaaaaacgtagaatggtaatctatttatataaccttacgtgataacgtaaggttattatttttttaataggagaggaattatgaaaaaagtattattagttgatggtatggcactattatttcgtgctttttacgcaacaagtgtctacggacaatttatgaaacgacaagatggaacccctacgaacgggattcatggttatatgaaacacttattaacagctacgcaagcgatcgaaccaacacatatcgttacatgctgggatatgggaagtacgacatttagaacagaatcgttctcgaattataaagcaaatcgtgcagcgccaccagaagaattaattcctcaatttgatttagtgcaagaaatgactgcaaaattatccattccagttatcggtatgaaaggctacgaagccgatgattgtatcggtacgcttgcaaaacaatattgcaatgaagctgaagtttatattttaacaggtgatacggatttacttcaacttgttgataagagcgttacagtcatgcttctgcgtaaaggaattggaaattacgaatattacacaccggagaaaatcatggaagaaaaaggtgtagagccgtggcaaatcgtccacgcaaaagctttcatgggagatacaagtgataattatccaggggtaaaaggtatcggtgaaaaaacagcgtataagcttattcaagagcacggaacagtatccgctgtactagaaaatgtagaatcattaacaaaagcgcagcgtacgaagattgaaagtgatttagagaacttaaatatttcgttacaattagcccaaattcactgtgaagttccaatttcatgttcactagaagaaggattacacacaatggatgaagaaaaacttagatttgtttgtgaagaaatgaattggggaagacctgaaatattaataaatatgctataaatagtttgggaagagggatgttgcataagtcgaactttgacttggtgacaccttctttttgtttttgtaaacagtattataataaataaaattatgtcgaactcaattttaaatatataaatatttcgacaagatataatgataaaagttgatgaaaataataacttttatcatgaagtgaattaatttcaacatagttttagataatcattttttcgtgttcacaaagttgtcagaaaataaacgagattttcatatgaagttcaaatagaattcacaacaatcaattattataagaacacacagataattctttatcttttatataaaccatcccccaaggaggacaatgaaaatgagaaaaaaagtgagaaaatcttttaaacaattattaattgaaaataaacaatcactattaaataataaagaaaatatgaaagaaattgaagagagaattgagaaacgacatgtagcatatagtggtgccagtaattaaataaaataaaaaagatagcctatgtaggctatcttttttattttatattgaaaaaacgctattcagctctttaattttgtaaatatgcaagatatttttatagcgtttttctatcaatattactcatttttcgaggttgaaattggtatataccaatttttgagattttctattcaaaatattacaaaaaatgttacaatacactcaaatttatactataaaatcattttaatatgaaaaattggaatgaaaagaaaggagaggaatatgaataaagatgtcgctttgaaatgattattatcatttcattaggagttgatgtaaaaagatgaaaagatacgaagaattggactctataagagggatttcttcattagtagtaatgattggtcatcatttaatgattttttcagcatttcaaaattacagttatgaagataataaaccatttgttgtgtatctattaaaagaaacgcctgctcgtctaatttttagtagtggtaacgaatcagttattatcttttttgttttgagcggatttgttttgtatgaatctattcaaaaaaactatagtagctatgggtcataccttttaaaacgtatatgcagaatatatattccttatattgtggcaataattatagctattgtatgccagattacaattagtgaatatggtatttcttatttaagtgaatggtttaatcgctcatggacgattgaaagttcttcaagcttaatcgcacaacatattttattggttgggaaatataatacagatgcatataacggtgtgatttggtcacttgtccatgaaatgcgaatatcaataattttcccgttaattttgatgatttgcttacgaaaaacgttaaggtgttcattactattattgtttagttttagtatatgttctgtcgtaatattatttttgtttcgctcgggcttaacattaacaagctatgcattaacattgcattacacagtactgtttttactaggagcactagttgcgaagtataaaaataatttaatagttttttatagtaattgtactaaaaacacgaaaattgcatggtttttatttgcgattttactttttatgtatgaagggcttataggagaaattaaagtgctcaataattttatatttcgagactacgtagtggcgataagtgcatgtttatttgtcatattaagtttgtcaatatcaactttgtcgtccttgctacataataaatatttgttatatttggggaagatttcttacagtctttatttataccatattatatcgttgttttcccttatatacatgctccatgaaatattaccgttgcctattattttaattttttcacttgttttttcgtttatacttgcaatgctttcgtatgtatatgtagaaaaatttgcattcggagtcggaaagtatgtaacaaaacaagtggatagaagagagaaagggttatctgtaaagagtgaattgcaggatgttattcagaaaagggcggtgaaataattgaagcaagaaatgagtataaaagattttcaacaattactgaaaagaagattcgtaacgattattttaacgatgtgttgtttaaccgcttctttagttcttatctctatgtatgttttaaagccgtcatatcaatattcaacgcaaattcttgttgggaatttagatgagtttaataaggaaaattcaacaaataaaacacaagaaaataagcaactagtaacatcgtatgttgatattttaaaaagcccattaattatttcaacagtcaaaaaaactttgaaattagagcaatcaagttatgaattagcacaaaaaatctcggttgtgaatacggacaactcacaaattgtaactgttacagtaaaaggttccaatccgaaaatcgtgaaagacattgtaaagacattggcagagcaatcacaaaaaagctttcaacagtacacaaatgtacaaggggtgaaagtattaactgatcctgagttacaggaacaggctgaaaaattgtttccgaaatttcaactgatcattcctatttctttaattgttagtttttttgttgggataggtttagctgtatttcgagattattttgatgaacgtatatacacggaacaggatttagagaaaataacaacagtctctgttattggtcacataaatatggaaccaaatagaaaaaagaaacctacagaggttgataaaaaatcatctatatatcgaggtgaacatgtcgatgtttaggacaaagaagcagctgccattcaatttgcatgatgatctgatgaaagagcagttttatacggtgtatcacgagctgaaaaaatccggaaaacaactgttcacagttagttcaacgaaggacagaggtgttgttgcctcgcttatagtaaatatgggtctagtgtttgcggaaatgaaaaaaaaggtgttacttattgatgtgaatttttctgatcctaaactacatgtattattacaaagtgatcacatgataacagtaaacgatataataagctcttcctcctgcaattatgaatctttttctagtaatttgtctaattacttatattgtattcctgcaaaaaaaacagtacatacagggacgcctttagttgctatggatgaatttgataatgcgattgctaagtggaaagaagattttgattacattttcgtttattcttctgaagtatttgagcttcctgctacgcacattattgcagggaaatgcgatggagtggttttagcagttaaaaagcgaaaagattcactacgtacagtgcaaaaagtaatagcggatataaataggaaagaatgtgaattaataggtataattttatattcttgaatgtgggggtaacgatccatgattcgtgaaacaaatcaagccaagttgtatacgattccggctcaagaaaagcctagcatattgaatcgaagtgtaaaacgcttgtttgatattatattttcaatcatattgttactattaacaataccaattatgttgttcttttgtattatgattaccttagaaacatcaggggctccaatatactttcaagaacgtttaggtataaacgggaagaagtttaatgtatttaaattaaggtcgatggtaaaggatgctgaaatgaacggaccacaatgggcaaaagaacatgatcaaagaattacaaaagttggattgtttataagaaaaacgagaattgatgaattaccacagctcttaaacattttaagaggagatatgtcttttgtaggccctagaccagagagagagtttttttataatgagtttgatgcgtatattccagaatttaaggaacgtttaatagtaaaaccaggattaacaggatgggcacaaataaatggagggtataatcttgatccaaaggaaaagttgaggctggacatggagtatattgaaatgaaaacatttcggacggacatccgtattttatgtaaaaccgttttaattgtattgaacggtaatggtgcaagataaatatatatgtaaacaaacaacatatgtaagtaggttacttgcaaaggagaacttgtatgggtagatctattctaagcaatattatccatctattttatagtacgattttagctaaccttcttcaggccgtcagtttaattgttttagcaaacttttttaacgcacaacattatgggatgtttagtgttgccatagcagtgacgtttgttatgttattttttacagacttaggacttagtaatacgtttcttcgagaaggggcaaaggatggagcagatttagagcagattttatcatcgtatataaaaataaggatgattctacttatttttatttctatcatcggttatattgctattcattatatgtatgcggataaaaatttaatttatatgatgataaacgtaatgtttttcatgttaataggattaacttggcaaaacatagggattgcctattttcaactgacggaacgtatgaagtatatagcgctcataaaagttgtatcagcatcagttgtcattataattacatgtttttgtattttcggagagttaccggtgtatgtaacagctcgcttatatgcttttgggtatatgattggtggtttattcagtatatatatcatgagaagaaagacgaaaatgaatatgaaagtcgtaattcataaagcgttattttggcaattaactccctttattattagcggttttttaataatgagtacgccacaattagcgcctatcttgcttaactatacattgccattaagtatggtaggtgtttttgcagtggcgtaccggatgccggcagctttatatcaagtaccaggggtaattgcaggtgcattttttccggtgctctttaagcattataaccagaataatatagaagagcatacgaaattaaatttacttcaaattaaatcaatggcgattgtaggaatatgtatgacgatcggtttatatcatttagcaccatactttatttctatattttttcatgaagaatggaggaatgcagtagaaccactccaaatattatcatttcttattgtgctacaaagtttaaatattgccattgctgacggtttaacgacgagtggttgtcaaaataagaggactgttgtgcagtgtgtagcattggtgataggtggggttatgctttatagctttagtagtcttggtggagtgataggagcggcatacgctatggttttatttgaaatagtcgctttagtgggatatatagcggtaagtgtagtgaagaaaaaaattgtattccaaattgtaataccgtatacaatttattttggtgtaacctttattggagtgcaatatatattgcatacatatcatttaattgcgcttgttcttaatatactaattgtagtagctgccatattcctatatgattatgagctaaaaaaacttcttctttcttttataagaaaaatacgcaaaaaggattatattacgaaacaggggatatagcctatggaaaataatatgaaagtatcaatgggatggattattcttctaatattatttgtcatgttaagtaaatacaatttatatattggattttcattgaagatatatatgatttttttagtcatatatttttgtttaacaattaaagactttcatattcaaaagttatattttcatgaagttatatttttactgttttatttcatttattgtttaagcggaattctttctatgtatttaaatgctagtattcgtatgatttttggcgtgctactcgttttaggatgctattttataatgagaaatttattggggaatactgaaatagtggtacttgaatcatctattgcttatgtaggaatagtatttaatgttgtaagtctactactctatataatcggtttacaatactttagtttatacggtggagaagagagagaaatttttgctggattattagttgatagaggatatccacggttaattggattgctagatgatcctaacatttttattttctataatacaatattttttatgtactatatgacgaatttgcaaaatatcacaaacatcttagggttaattttatgtgttacgacgagtctattaaccttttcaagagggggaatattagcgcttgtgcttgtcatttttgtatatatatgtatgtctagtttcgctaaaaaaataaaaataattatgagtttagtattgtttagtgtagttatttttagtttatcgaatagtgtaatggggggccaattagatgacatattaaataaacgaatttctgatttttcccatgataatggaagtggtagatttacattatgggaagctgcttttaaatattatttatccaatccatatatcggaattggtgcgtttaacttctcgaattattatgagtatcaatttaatgaaaaattatatgtacacaatacatttttagaaattttgtctgagtcgggtacaattggttttcttctatatagtgcgtttttattcatattaatgtttaagttagcgcagcatactttgtttcgtgaaaaaccataccttctattgactatgattgcatttttatttcagatgatgtcattgtcactcattattaacgaagcgttctttttatttttagcagttgttgtgaagtatatttcaatatatgaaggaaggggaaagatagatggtaaaatgtctatcagcacataataaggcgcctcatgtttctgtaataacaccttcttataatagtagacgatttataggtgagacaattttatctgtacagaatcaatcgtatgaaaactgggaaatgattatcgttgatgactgttcaaccgaccaatctgccgtaaaaattaaagagataatagaaggagactcacgtattaggttattatcattaaaagaaaatgttggtgctgctaaagctcggaatttagcgattcgagaggcgagaggaaggtacattgcctttttagatagtgatgatatatggttgccgcataaattgaagacacaattgttatttatggaagaaatgaatattgctttttcatatgcgtcgtatagtttaattgatgaaaatggtaatgaattaaatcgcgaagtgagtgtaccaaaatctgttgactatcattatttagtaggaaatacaattatcgggtgtttaacggtgatgattgatcgtgaaaaaattccgtatgtcgaaatgcctagtgtacagccggaagatacagcgttatggctgaacttattacatgaagggcatgaagcaaaagggatacagcaagtattagcgaagtatcgaattgtagcaaattctgtttcgagaaataaagttagagcagcttttcggtattggaaattattaagggaccaaaaaagtcttaatgcagtgcaaagcttttactattttagtaagtatgcttatcatgcttataaaaaaaataaaatcaatgtagttgggaagacgcaattatgaatatactgttgatgactgataaattgataactggcggagccgaaaattatttctgtaaattagaaaataatttgcattatgaggattttaagatttatacagctgcaggtgatggagaactatatgaatcccttactagaaaagaaaattttatcttacttagtcgatggaatcatttgagaaatatttattatttacgaaacgaaatttgtaaacgaaagatagaacttattcatgcaaatagtttgcgaatggtattatatgcttttctacttcaaaagtttattaaaaaaaagatgaaaattgtttatacgaaacacaatgtaacgatattagaaaagaaaatgccaacgctttttcggtatttcatgaataaatatgtgaacaatattattacagtaagtgagtttgaaaagaacaatttaatttcaattcatgtagcagaagaaaaaataaatacaatttataacggtgttgatattgaaaagtttttattccagcagaaaaagaaagaatctacatataaaatagggatattagctagattatccaaagagaaaaaccatcaactatttgtcaaaattgcaaatgtgttgaaaaagagaaatgattttatgttttatattgctggtgatggaccagagaaagaatcgattatgaaagaaatagaaaaatatggattgcagcaaagggtgaagatgctagggaatatttcagagccgcatgagtttatagggaatatggacgccttacttttattatcttttcgtgaagtgtttccaatggtagtaattgaagcgatggctacagggacaccaattgtttcaatagatgttggtggaatacatgaagcggtaatagatggagagtcaggtgttttgatatctgaatattgcgaatcagaattcgcaagtgcgcttgaggaactacaagggaatgaagaaaaggtaactgctattagattgaaagcacgagagaaagcaatgagatatttctcgttaactaaaatgatagaggaaacgaaaaatatatatgaattaaacaaatgaccgagtaggtcgtttgtttttttttattatagaaacttttaagagacaactcacatattatatgaaaaaggtaatatgaggagtgaatttattttgtcagaatatatttcatcccaagaagattgtgcgccagaaagtagcgttcatattgattgttttggcgcagttccaaactcgggaaatgatagctcattagcaattcagcaagctattgattattgtgtagcgaatcgaatttcgacggttagaattacagggataaatacgtacaaaattgtaaagccgattgttattaaatcaaacgtaagattagagttggatcctaccgtaacactgcaaattgatggggattttaatgcatttgagctacaaagtaacgcttcgatagttggtggtactcttcaagttataaatccattgtttcaatctgctgttatttatgtttctggttcacaacaaatcgaagtacctaatcaatctgttatatcaaatataaatataataaatacaactccatcgtataaaggaaaagctatacatttttattgtcaaaaggcatgggattttattagtttctttcaagttaaatttattcaaattaaaaactttcaaactgcaatacatttgaagacagaatatataaatgatatcaatacaccttgctggattaacgccaatgtatttcaatctatatttattgatggatgtgtgtatgggattgaagtagatggaaatagtgatttgccaaatgaaagttcaggaaatacgtttcatgatattcaagtgcaatgtagacaacaaacggaaaaagtaattcgttgttcaggtgcgtataatacatttgattgtatgatctgggatacgtaccggatgagtagtgaacaaattgttattgaattttcttccaattctcatcgtaactaccttttttcaaatctgctttcgacaactattgtagataaaggacaatacaatgtttgtaagtctacttatgaagaatccctacgaattcagttacctttgacgttaaatagacctcatttaataggaaatcaagatgatattttagtaaatgctcagcagaaatataacgttaagcaagtaagtggaaaagtgccgtacgggggaaatctcacaaattgctttaatttaatagatgaacaaagtgtaaactatattgacgttccagatagtaatccagttgtaattgaaatggattttacgaaaaaaccaatacaaatgttaaattgttttggaatgtattttggatggggagagagcccaaagaaaattaaaattgaatatgcattaagtgcaactggaagttgggttatcgcgttggatgttccattaaatgttggcgatacaattatatcgaatatgaaggccagtcagttatataaagttagaattacattaagtggttattctcaagatcataaacgttttcgaattaatcgtatctttgcaagatcttctatggaaaatgggagtgcttggttagcgacgactggcggaagaatgtttggagatattgaaatagaggcaagtaaaggtataatcatgaagactgctagtggagtgaaatggaaagttactattaatgaagctggccaacttattacgactaaaataacttgagatggtgtttaatcgtatatccttggacgagttacaacgtagtgggatataggtaatgaaaaagagattgtaatttggtttcaaccaaactacaatctcttttttgtttcaattacttccaccaaatccaagtccaaaggtaatttcgtacatttcgaggagtaatgcgaatgaagcgttcaccgtcaaagaagcaatttaaatttggaagtgcttcatctggattttctggaacaaaggtgacgatgttttcgttacttgtaacggttactgtaattggttggtcggtaggcgagacttgaagttgtaacgaaatattggccgtatttttaaagggattattaacaggggggcttatcacttgtactgtgaataacacgataattgtttcgtttggttccaaattagtagcgactaggaaaccgatattcggattcgctagtggagagcgttcaccgttaataaagacagtgccatttataaattgtaaacctgctggaatagtatcttgtaacgaaatatttgagagtgaaatttcagaagtatttgtaatgcgtaccgtgtaatcaaaatattgatttaaataagctgagctgacggaagcatttttcgtgactgttgcagttataaattgaactggtatacgaacgatatttgaattaacaatgaaagtaataattggatcctgtggtgtcaactgaaaagcagcggtaactgttgcagaatttataattgtactgtttgaaagaatagaagttgcgagaacttgaaatgttatagttgctactgtacctgcagataaagaaccaatattaataccagtgtctggacgaacatttggaacgggagtgccgttaatggttacgctgttttctataaatgttgtaccagctggaattgtgtctataacagaagtactgattgtaggaattggggaatgattgaataccgctaatgtgaatgtaatgatatctcctataacgacaatagatttgtcagctgttttttcaatgcgaaccatcggatcaataactgtcgttgtaacggtatttgtttgttttgtaattgtaataggtggttttgttggatcaatgataacggtataggaaacagaagcatcattattaattgtagattgaagagtagaagaagatattgtcacttggaacgtaataataacaaattcattaggagcaagatttcctaacgtaataccattttcaggattctcattaggctgattgattccgttaatcgtaacactaccagcaacaaaagtcgtatctattggtacggcgtctatggcaagaaggtcttcaatcgtcacattaccgctattcgtaatcgtaattgtatatgttaaagtttgaccaggtaaggcgtttgttacatcagcagacttaaaagcaatgacattatcattttggacagtagttttgacagtatttgttgtagtcgtatttgtaacaggtacgttatttgggttgactatatagttaaaagtagtaattgcgttgttgtttagttcatttggtgttggaatagaagtcacagttacttggaatgaaacgatagcatctccaccaatagttatagtaccaattggtatgccgcttactggattcactcctggaagagtttctccgtttacaatgacgctattttctataaacgtagtaccttgaggaataatatcttgaatgattacatcatttactgcaacattaccggtttgatttagtgtaatcgtatacgttaacgtatcaccaaccgttgcaaatgcaaggtcaacagctttattactattcaaattcgcatgattaatttctgttaaagcagctgatgaaataatagtttcggtaataggtggtcgatttggtaccgtgtattcatattcaattgtactcgtgttagagattggatttgtttgtggaatcgaagtaacccgtacttggaatagaatggttgctgtcgtattaggcggaatgttatcaatttgtataccgttaagtggattgtcatttggccgagcgttgccattcacgataacactattctctataaagctcgtatttgctgggatgatatctgtaacaataatgttttctacttgtatattcccattgtttgtaatggaaatagtgtaagggataatagtttgtaggtcagcatattggataggtgttgtttttgtcgcaattacattagcagaaataacttcagtgaaggtaatattgctagtggatatttgttcttccacgtttattgtataacgagaagttgattgattttgaacatggccgctagcaggaagagctacgacggtaacagaaaatgtgactgggatagaaatattaggagcaatcgttcctacaagtatacctgcacttgggttggcattaagctgaggaatgttatttactaaaacgctaccgtcaataaaggttgttccattaggaatattgtctgtaaatacaacagcagtggcatccgtattccctgtattcgttaaagttgttgtataagttaaaatgtcaccaatcgttacagaggttaaatcaacagttttaagtgaaacgatgtcagcatcattaatttgaacaaaagtagtattggaagtagtagatttttgaattggtgcaaagtcaggattgaaaataaagtcgtagacgacgtttgcagtattaggtgttggatttacagcaggtaaattcgtaacggaaacttggaatgttattgtagccatttgacctgctgcgacattaggaatggaaaagccgatattcggatctgctgcaggaagtacagtattattaactactacacttcctggaataaatactgttccatccgctatagtatctgtaaaaaagatggagttagttgtagccgatccattattttgaatgaatactgtatattcaatggtttcatcaatgttagctaatacagtattagtggactttgtagtaataagaatagcatcaataaattgtatgtttgtagcattggaagaggtcgtttctgaaattggtggtgtgcttgggtctggtcgatactcatagtgaatgacggcgatattattaatgttattttgtggcggtatagagactacgcttacttggaacgtaacaataatcgtattatttggaagaattatatcaagattgatacctgtaattggattttcgttaagtcttggtacgccatctacaagaatgctatttggaacgaatgtggtgccagaagcaattgcgtcaagtaggagagtatttgtaataggtattgtaccagcgtttgtaactgcgactgtatatgtgatgatttgaccgatacgtgtaatggatctgttagcggatttaattgcactaacatttgccgtccgcacttcagtatttactgcatttgataacgatctacgctgaataatttgagaactagggtcaatttggtattcgtacgaggtgtctgaaatattaatgactacattgccaactggtatatttgtaagttgtacttggaatgaaatagtgactgtttcatttggttgtatcgtgccgagagttactccgttttcaggattagcgccaggctgaattacattatttattgctaagctatcttcaataaatatagtaccttctggaatgttatcaatgaacacggtattgttagctggaacggttcctatattttgtagtgtatttgtgtaggtaataatttgcccgattgatgcgaaagttatatccgcgcttttaacagaaataatatttgcgttttgaagtgatgttgtaacaatgttagaatttgcagagcgattcactggtggggctgtagggatacttacatattggtaagttgctgaagattgatttacaatttcggtttcagtaggtggattatttgtttgcacttgaaatagtatcgttttggaactgttagctggaattgttccaatcggtattccgttttcaggatttacacctggctgaaggacaccgttaattgtgacactatcgggaacgaatgtagtcccagctgggatagaatctgtgaaaacaatatttattgcgtcaacattaccgatatttttcacttcagaaatataaagtatagttccgccaatatctacagttgttggattggatgtttttgtaattgtcaattgtgcttgcacgaaatttgtaatgacgatattactagtagatgtttcagtaataggcggttgccctgggtctggttggattgtatatgttgtattggattgatttgtaatcgattctcgcgagaatgaatctttaataagaatttggaacgaaataaggtgagtagcgtttgctgctaaggtaggtaaagtaacacctacatttggattggcaccaagtatagctgttccattaagtgtaaaactattttctacgaatgtagtatcttggggaatcgtatctgaaaatatgagattcgtagctggaatatttccggtattttctagtgttattgtgtaagtcaaaatatcacctgttgttgtttgaggtgcattgactgcttttaaagaaaggatagttgcatccgaaatttgtgtgaaagcgggattagacgtaattgttcgagagatgataggagcagttggatcggcgataaaagtatagtcaatacgggctgtattagaaaattgggttcacgcttggtatagattgaacgataacctggaatgttacagtgacgatttctgacggtgtgatggagtttaatggtattcctacgttaggatcggcacctggaacagaaacaccactaatggtaacgctattcggaataaatgcagttccttctgggaccaaatctgttaaagtaactgtatttgcagtagtatttccgttattttgaacgactactgtgtaagtgattgtaccgtcagtagattgtacgagagaatctgtacttttaattacggataacgatgcatcaacaacagctgtattaaccgtattagacgaggatgttgctgtaacaggaggttgacttggatcgacaatatacgtgtaacttgtaagtgcttgatttataatcgctccttgcggtggaatagaacttgcaagaaattggaacgtaatagtagcggaatcacctggtgcgataataccaactggaataccgagagttggacttgcatctggaagtgaaatcccgttgagcgtaacactatttggaacaaataatgctccttcaggaactccgttaatgagtaatatagagtttgcagggaagtttccagtattcgttaatgttgctgtatacgtaattacatccccgatagatacaattgaacgatttgcttgtaaaacagttgtaacagtcgcgttattaatttgtgttgaagcgctattagaatttatcgtgcctgtaacaggaggagaggccggatcaacgatgaatgcgtattgaatagatgctacgtttgtaatcggatttgaaggtggagtagatgtaactatgacttggaaagtaacggttaaggaactacctgcgctaactgttccgatattcactccgttatttggatttgcgcctggaatggtacttccatttacagcaaaactattttcaacaaaggtcgttccagttggaactgggtctgagaaatttacattcgtagcgtttgtattgccgttattttgaatcgaaactgtataagtgatcgtatctccaatatttgcaaaggctgtattagcagtttttacagctgaaagtatggctgtattaatagaagtaacgaagacattcgtttccacattgccaggctgagccagtaatgcattgcctacgttatattggaagttaacaaatcctaagttttggagttcaggtgtgaacgttgttggattacttacgatttgtacttggaatatgattgtaacagtttgatttggactgattgtatttatgccaacaccgttaataatcgaagcggatggtaatggagtgccatcaacaataactgatcctgcaacaaattgtgtccacgatggtaaagggtctgagaatatagcgttgttagcaggaatattgcctgtgttcgtaatagtcgttgtatacgtaatcgtatcaccaatcgttgcaaaagttttatctcctattttaatagtatttaaaatagcactttcaatttttgttgtaacgttgttagaaataatattttttgaaactggaggattagctggattaacgatatgttgaaagctaacgctagcttgattagtaattggatttataggcggaatttcattggcgataatgtgaaatgctacgatgacagattcgtttggcgcgatatcaccgattggaacgcctgtaatgatatctgcatttgggatgctagttccgttcagtgtaaagctattcggttcaaaggaagttccgtctggaataaggtcggtaaaaataacattcgttgcactcacatttccgttatttgtaattgtaacggtgtaggtaatatcctgcccgatatctaccgtagatacatttgaatttttttgtgcagtaaggatagcgctattaatttgtgttgtcgttgtattagattgattggaagttgtaataggtggctggctaggatcaacgacataatgatatgtggtagaagcagagttagaaatgggattaagtgttggaagtgtaataacagttgcttggaatgtaacgattgccgtattaccaccattaatggaaccaatatttacaccagttgataaatcggcgtttggaatggtttgcccattagctgtgaaactatttggaacgaaacttaaattgctatcaagaatatcgataatagttacatcagttgcggtcacattcccggtattaggaaggttaagtgtaaatgttattgtattaccaacatccgcaaaagtaagatttgctgttttggtgctaataatagttgcgttgtttatttgaaggagtgtagtgttggaagtagctgcacttgaaacgggaggattaacaggatcaacagtaaattcatacgccgttgatgctttatttggtgctgggttactagggggaatattgtttactgtaatttgaaagacgatgctatatatttcatttggtggaagtgttgcaagtaatacacctgtatttggatccgcgttaggttgtaaaacgccatcgacagttaatgtgttaggaacaaatgtgagtccacttggtaatgcatctgtgaatacaatattagttgcatcggtattgcctacattggtaatagaagtagtataaaaagcagtttgcccgatatctgcaaaggatacactttcatttttggtcatagataatatggcttctttaatttgggttgaaacaggattgctaattgaagtttctgcttcaggtggtgagactaattgatacgatgttgatgagaaatttacaattgggtttgcggttggtaatgatgttacagtaacttggaacgaaactgttactgtagtcccggctgttattgtcccaatattcacaccgttcgatggatccgccccgctttgaggaactccattaatagaaaatgtgtttgcaataaatgtagtgatgcttggtacggtatctgtaaatataacattttgtgcggatgagtttccattgtttgttaaaacgacagtataagtgagtgtgtctccaatacgactaaaggatttatcgacttgttttaatgaaagaatgttagctgtattaatcgtagtaaacactgtgtttgaagtaacgtttcttgaaacaataggtgcattgggatcagcgataaatgtgtaagaagcagtagcggaattggcaataggattttgaacaggggtagaagtagcggtcacttgaaatgctatagatattgagctgttaggggcaattgatccaatcgttatgcctgtattaggattcaatccaatttgtgtgagtccatttattgtaacgctatcagtaataaatgttgtaccatttggtataagatccgtgaaagtaatattagttgcatttgtattaccgttattcgttaaaattgtcgtataggttatggtatcgcctagtgttacaagggtttgatcgaccgattttaccatcgttatcatagcatctaatacaggatttgtagcaatattcgttgaagtagaggtagtagcaggagcgctgtttggatcaacagtataagaatataaaattgtgtcattacccataattgaactggaaggggaaacggaaataacatttacttggaaagtaacagttaccgtttcaccaggagcgatatttggtatatttactccaagtgctggttgcgcaccagactgctgaacgctatttattgtgactgaatttggtataaaggtagtgttagctggaatagcgcttgtgaaagtaatattcgttgcggctgtatttccggtatttctaatagtagttgtatacgtaatcgtatctccaactgaaactatagatttatcagcactcttttttgttgttaaaattgcactattaatagttgtcgaaaccgtattagatacattcgtttgcgatacggcaggttggctaggatcgaccacatgtgcaaattgtacagagctataattagaaattggatttatacttggaatgtttgtaacaagtacgttaagagtaatcacggccgttccatttgggtttatatttccaatctgaattccgttagctggatttccgatttgctgtgtaccagaatcgtttgtaagagtgccagatatgaatgtcgttccatcagggaaagtatccgtaaaaattatattttgtgaagtgacatttccagggttatttaatgtaattgtataagaaattgtatcgccaattgttgcgaaagttttatttacagatttgattgccacaatttccccagaatttatttgtgtcgaaaccggattggacgtcgtacttcttgaaacgagtggtaagtttggacctgtcataaattgataattaatggaagcgctgtttacaaccggtgagtttggtccgcctggtccaattgtgaaaattggatttggaatgctaactacttgcacacggaaggtaacgtttataaaatctccagcaataatatccccaatcggtatcccattcgctggatttactccaggcaataaaactccgcctactcgaacgctatcttctataaatactgtgttatttggaatgggatctgtaaaaatgatattcgtagcagttgcgtttcctatattatccaataaaacagtatacgttaaaaatgaatttccaggtgctacgtcagaaaatagtcgatctacacttttcgttgcttgaataatcgcttcgttaatttgaactaaagttggattacttgtagctgtttctatcaccggcggctgggtaggatcaataatgatcgagtatgttgtgctagattggttcaaagttgggtttgtagctggtattgagccaacgatagcttgaaagctaattgttgtcgttcctccaactggaattgagtctaaagagattccgctatctggtctaaatccaagttgtgggattgtattaatttgtacgctatcaggaacgaatgaaagttcaggtggtaatatatcgataaaaacaggtgtgtttgctgaagtatttccgctattggtgaggatagttgtatacgtaattgtatctccaacagcagcaaaagcactgcttgcagtttttgttgcgataacggaagcagtatttacttgtgaaaaagttttattagattgaactgttcgtgaaactggcggttcatttatatctacaataaagctatattgaagcgatgatttgttcgggattggattcgggtttggaagtgttgtaatgtttacttgaaaactgagtgtagcagatgcatttgaattcaagttaccaatattgataccgttttgtggatttgcattagtaatagttgttccatttaccgtaaaactatttggaataaacgttgtaccatttggaattacatctgtaaaaataacattgtttgcggtagtattaccggaattagtaatggtagaagtgaaagtaagtgtatctccaatagtagcgaatgttgaattgacagttttatttatagaaagagtagcatcaataattggagtaaccgttgtattcgtaattgtactattgacggcaggtgattggttgggattcacggtatattcataatttacaagagcattatttgttaatgtgccactaggtggtatcgctaaaatttgtgcttgaaaagtaataaatacagtatcccctggcgaaatatctgccaagtgaataccaagtgatggatctaatcctggttgtgggacattattgatcgttacggagttttggataaatgaagctcctgcaccaagcccatccgttaaaacagtcgcactagcaggagtattacctgtatttgttactgcaatcgtataggtaacgatatcgccaattgcagctgtcggtgtattcacagacttagtagcgacaatagtagcgttattaatttgagttgttattacgttacttaacgtattggcggatgctggaggtaagttaggatctacgacgtactggtacgttgtattgctttggttcgggagtggatttggattcgggatagaatttacttgtacttggaacgagatgagcgtatttgcattcggatttattggatcaatggcaattccacttgctggatttacattaggcagtgtattcccgtttacagtaacactattagcaataaatgatgtcccgtttggaattacatctgtaaatattacatttgatgcaagtgtgttcccgttattcgttaaagtagtcgtgtacgtaataatatcatttacgttagcaaactgtttatctgcagatttagtagcggcaattgaggcgttattaatagttgtctgtacagtgttagaagcaaccatctgcatcacagcaggtttggatggatcatacgtatattggaatgttgtgcctgattgatttgtaattggatttacagcagggatagttggtacaaaaacttggaatgcaacggtgcgtgatgaattcgctcctattgtaccaattgaaatgccggtagcaggatttgcgttagctacagggacattattaatcgttacagtattaggaatgaagagggtacccgctggaatgatatctgtaaacgttacattagcagcagggatattcccgttatttgttaaaatagtcgcatatagtatgacatcaccaacatcagcgaagtttgtactcgttagttttgtagcaacgatattagcagtattaatttgtgtagttactatattgctagcagcgtttctaacaagagcaggtaaatttggatcagcgataaagctatattgaagtgaagcgctgttttgaattgggtttggtgaaggtagcccatttgcacttatttgaaaaacaatcgttgtaaaaccacctgaaggaatggagccgacttgaagaccggtactagggtctgcacctagttgtaaagcaccacctataaaaatactatttggtacgattgtggtgccattagggattatatcggtaaaaataacattatttgctatagtatttccaagattagctaaagaaattgtatatgtgattggttgcccgacatcggcgatagttaaatctacttctttgacaatcactacatttgctaaattaatttgtgtacttacagtgttacttacagatgtttctacagttggtggatcgcccggatttagaataaaactatactgtgtactagatgaatttatcgttgggttttgtattggtaaagaggtgacggttacttgataagagacggtaagtgagccgttagcagcaatggaaggtagtggaacacctatatttggatctgcgttattttggagtacaccattaataagaaaagtgtttggaataaaggtagtaccgtctggattcgtatctacgaaagtaggactatcagcagaaacacttcctgcattcgtcaaagtagcagtataagttaatatatcccctacggtagcgaacgctcgatccactgttttggctgaaatgacatttgcatcgtttacttgagtaaatgtagtggttgaagtagtgttcttacttacaggtgaagcgtttggatcaacaataaagttataggagatggaagcgctatttgaaatagggtttggatttggaatgctagttattactacttggaatgaagctgtaattgtagtattagcattgatgctaccaatattgatgctagttggtgtaacgcctggttgagtaacaccgttaactataacgctatttggtacaaaggcggttccattcgcaattgaatcggatagtaatacattgttcgctgcaacattcccatcgttagtaagagcgaaggtgtaagttaatacatcgccaacttccgcaaacgttttatctacagatttattagcatggagatttgctagtctaattgttgatgtaacagaattagaatttgctgtctttgaagtcggtggcaaatttggatttacagtatatagataagaagcgaaggcattattaatgataggattttgggtcgtaatattgatgactgttacttggaaagaaagggtaaaagtagccccgccaggaattgtgccgataggtaaagcgacgagagaatctacattttgcaaaactccgtttagtgttacagtaccaggagttaatatcgttccatttggaagtgggtctgttagttgaacgctattagcggccgcatttccactgtttgtaataagaattgtataacttatcgtttcgccaattgtggcaaattgtttgttagttgattttgttaatgttacattcgcattgttaatttgagtggaaacgagattagaagaaatgttttttgtaacgggtgattggctagggttgacggtatattgataagaagcacttgatccgttagatacgacatttgacgcgggtattgtatttactactacttgaaatgcaacattttttgttgtgccgcttgggatggatccaatattcacgccgttagcgggatttgcgcccacttgtgtcgtgccatctattgttaaactgtttagaacgaaagttgttccagtagggatgacatctgtaaaaataacattgttcgcatttgtattacctgtagctgtaaaggaaacggtgtacgttagtgtatcaccaatatctgcaaaatttttatctactgctttcgtcattgttacagtagcattattcacttgagtggagacaatatttgtcttatcagtcccacttactgctggttgattaggtacaggaatgtattgatatgttgttgttccactatttaatattgggtttgtttgagggatagaaggaacgagtacttggaatgaaatagtagtagtggaatttgcggcaattgacccaattgatataccattagcgggatttgctccagcttgagtaactccgttcacagttacactccctggaatgaaagtagtcccgctaggaatcggatccgtatatatcacattcgttgcagcgatatttcctatattagctaaggcaatactgtaagttaatgtttcaccaatatcggtaaaaagtttgttaactgattttgttccattaatatctgcgaggttaatttgtgttccagcagagttgcttgttgcaagaccattaaaagttgttcctccggcgattggtgtatattgaaatgtaatattagcagtgttagagataggattttgacttggaagagaaacgacagtagcttggaaagttactgtacgagaagcaccattattaattgttccaagagatataccagccgcaggatttgcatttgtttgcggtacgttatctactgttacagtgccgggtataaaagaagtaccgctagggagactatctataaaaatagcgttattggcaggaagaagcccggtgttagggatagtaactgtataagtgagaatatctccaattgcagcaacacttttattcacgcttttcgtcgcttgtatatttggtgagtttatattaatttgtaagcctactgtatttaacatatatgcgtccccgttagtagttaaacggattgcggcggatacttgtgagtttgttaaataaggagaaatatcaatggaagtaatgtcccagccctgtcttcctgcggagatgtttgtacttgtagaagcactttgatttcgcgttccgaatgtccctgttgtatctaagtttcctgcagcattattaacttgagaaccgaagaaattatttatagcattgtttggtccagataaagcatttaatgaactgaaatttggtccaaataaagcttgatccccggttaaatctgcatctccttcggtagaacttaaaaataatctcccgcttactggtcctcctgaaggtgttaaaaatccagaaacagatacatcggcactaccagtttctgcagaaacacggttaccagctacataaatggttaagtttcttgcaggtaaggaaccattttgataagcgacaatgagcgtccatccagaagaattgatagccccattagaagcatctaaaggatcaacaagtccagggacagagccggttgtataagagccagatccagcagcttgaacgagggatgttacatctgcagatcgtgtatagaatccaaatgtgacagatccagaaacgaaagtttgatttgaagctgtaatagccgaaggggtaattgagtatgttgacacaggtgttgtgaaagaaacaggattccctaaaatactcgtaatgttttgatcacgagataaatagtttccaccccaaacgagttctgcgtaaagaatagtactaccagcagggatatttaaaatagtggtagaactattttgtgtatagtttaacgttgtacctgcaggaaaagtaggtacttgtaaagcagtattcgtagttacgaatgcaccaattgcaccaattgcaccgattgtaccagcacggttttgattgctaattttacttaagcctaaagtattacctgtaatagcgagtgcgccgttagtggtggtagaaaatcgattcgtaatgggcatgttgtcacctcatttacaatatagtcttggtcaaaataacatatgtgtgtgacaaataaagcgaaacatgtacaagttgatttcgtaataatgatttaaatgtctagataaggggatggagtatgattgaattagaaattaggttggagcgtcttagggaagaacaaataggcgatattgtagcattgtcttcttatattggctgggattataacagagaagaagttgaaacaatttttaactcaggtattgtatacggcgtatggaatgagagaaaggaacttattgctagcgcggcaataatattatatggggagaaattagcgtctatcggaatggtgattgtacatccagattataaggggagagggattggaaagataataacggaagcgtgcgttaaaagcgtatcagctcatactccaattatgctgattgctacggatgaagggaaacctttatatgaaaagttaggatttagggcagtaagttatgtttctaaatacatatgtaactcatacaatgcgaaagattattgtgtaagaaatgaagattatgtgatgaattatgaagagggtgatttagaaaaaataataaaaatagatgaatatgcgtttggaacaaatagaaaagagtttttaaagaaaagaattatgcaaagtgaacagtgtatcgttgtaagggacaaggaacaaaatgtattaggttacggtttaagcatacaaacaccagaaaataagataatagggccggttgttgctaaaaatgatgagatggcaatgagaatagtacatgatttagcaagagggcataatggtaaattaagaattgatgtactagaaggaaagaacgatttcatgaaagaattagagattgctggttttaaaaaggtgaatataccgccaattatgatgaaaaatagtaatcggttaataaacagaaatagtgaactatatagtattgcagcgcaaatttttggataaaaaagaacccttttaaatgaaggattcttttttgagccaatttaatcacgatattggtcatgagttggctgaaagaggtcttcctcgatatctcgcaccatagaaaaatgatcaacgttataatgaccgtgtaaagttttattgtgatgaccaataatttgttctgcagacaatacgttagaatcagttgttgaatgaccgtttttaattaatgtaacgtcaaatccttgtacagttgctgtcctaacggcagtgtcaatgcaatgttctgttttacatccgcctataacaatatgattaatgttttcttcttttaaaagttcaagtaaagaagtaccgtagaatgaattggttgctgctttattaataaagattgcagactggggtacttgaatttgattatgtacttcaaatccttcgccactaccagaagcaacatcgatatctcttacgaaaacaataagagcatttgaatctattgctttctggagggctatatttagtgtagataatagctcggttttacgaaaaacttcattttcttgctcatttccatcaattaattcttgctgagcgtcgataattaatagtgcttgtttcatcgtgtctcccctttaatatgaaataagttccactgtacatattccttcagattattagaaaaccctccattgtaagagaagtagaagattgatttacaaagttgtcaaagaaatttcattctcatagcgtgtaaaaacatgtatgataggagatggagaatttttgagtaggtgggaataacatgcaaacagtagaagattatctttcattcttacatacgaaaggatttaaattatcagaggaagcacaagggtttattatgtttggacaaggatatactggtgcgtctgatgggattgtgaacgcagcaatagaagcgacaattaaacatcaattgcagtttgatggtagttatttcgttgcgttattagaacgattgaaagaggaagaaattacagataaaaaaagcgctaaggcttttatgcggaagttacaagcgtaacttcacgcagcctgcgcttctttttttgttttggaaggtaattcaacaaaaatcatgcctagaaaaatacatagacatccgataatagcagaaatagaaagttgttcatttgcaacgagaacgcctgttaatgcagcaaaaacgggctccattgcgaaaataattgctaccctcgttggagaagtgtgtttttgtgccgatgtttgaatgaaaaaagcaatagatgttgcaaacagggcagttagaaagagtgcgaataaaaaggattgattcgtccatagtgatactgaaaataacttttcccaatcttcaaacaaaaaagcgcaaatagaagaaaatataccaacagctaatacttgagatgtgcttaataataaaggtgatattttcttagaaaagaagccgttaataagaatatgggcagcgaaagcgactgcacaaccgagaacaagtatatctcctatatttaattggaaagaatcagcagctgttaataagtataaacctgttgtagctacaacaataccaagtacgatgaaaatggtagctttttgttttaaaaagataaaggaaaagattgggaccataacaatgcttagcccagttaagaaacctgcttttgaagatgttgtatagagtaagccaaatgtttgcaataaataaccgacaaataagaagaacccaactattaatccggctaaactactatgttttaattcttgttttgaagttttctgtgagaaaataatttgaacgaataataaaataattccagcgaataaaaagcgaataccattaaacgtaaatggaccaacgaaagacatagcgttttgaacgacaacaaacgtagctccccaaataaaagagacaaataataaagcaagaggagcaatccactctcttttcacactcatacccccgttaattttgtaagatagcttttctagctaattcatcagctactttattttgactacttggaatccacttaataaaaaagagatcgaagttttttatgtactgcagtgcttcatctaaaagaggtgcaaatattttattttttgcgtattctttttcaacagcccgttcgacaagctgggaatctgtacgaaaagagacagtgctataattatgctcgatgcaatattttaatgctagaagtaaagcgcggtattctgcttcatgattggacattgttccaagtggtactgataattgtacaggcggctgaacgcctttaataaacactcctgcaccagaaggaccaggatttccttttgatgcaccatcaatatatacttcaatcaaaatgagaaacctccaaattataagattatcccctacttaaatatttttttgaagtaggggatagggtagttatccgattgtgatgctgtaacgacatgtaaatgtttcattcgcttgtaaagattgaattccctttttgtccttgaaatcttttgctggatttacttcatcagcgattccataccaaggttcaatacataagaaaggtgcgttatcccctggtgtccatacgccgacaaatggaaatccatcaaattctacttttacaaatttattatgtttatgagaacgaatcgaaatttcattcgtattcatatgttcaaaaataagtgcatcatttttgaataaatcgtatgtaagtggcaattcagtcgtattttcagcgattaattgctttttgtttgaaagataaggcccttctaatacgcttgtttctaagcgttccgaaccattaaacgataagtgataatctgtaaatgattcaccgtccaataaagggaagttgaatccaggatgtgctccgattgagaagaacatttctttagaagtaggattgtttacttcatatgttacatgaacactttgtccatctagctcataagaaacgagtaattcgaattcgtatgggtatttttttaatgtttcttcattactagtaacgatataagtgatctttgtttcgctttgttctttcacagagaaagtaagatcacgagcgaaaccgtgttgtgttaatgaatatggtttaccgtctacgtagtatgtattatctactaatcgaccgacaattgggaacaaaattggtgcacggcgtccccaataagtagaatcaccttgccataaatattctatgttgtcttcttttaagcgaacgctctgtaattctgcacctttgtcagaaatggaaacgatcactttttcattttgaattgttgctgtcatgaagtgaaacctcctaaatctttcatatgtttcattatacgttgtctaaaaggaaaaaggtagtttatgataggaaatctattgacgaaagaggggctaccacgtaaaatataatcttgttgctaaaaaaaagaataacgtggttcgaaaccatcccacgtaaaaaaactaaggagattttgtcatgaatattagaacattagtcggtaatggtattttagcggcattatatattgctgtttctatgcttattcagccatttggctttacaaatgtacagtttcgtatttcagagatgtttaatcatctcgttgtatttaacaagaaagcaatttacggaattgtattaggtgtatttttaacgaatctctttttctcacctatgatcgcttatgatttagtatttggagtaggccaatctattcttgcgttagttgcaacgattatttctatgcgatttattaaaggtgtttgggctcgtatgatttttaatacagttatctttacgattacaatgtttatgattgcaattgaacttcatcttgcattgggtttaccatttatgttgtcttggttaacatgtgcaatcggtgaatttgttgtcatggcgattggtatgcctgtaatgtactggattaataagcgagtacaatttgaaagatttatgtaatagatgaaagagctattcctatagggatagctctttttgcatgtgataatattgaatataattctttgactcttgataaaatataataaaataaagtgaggcttttattagctggctacatataagaagtcttacataaggggaatgtagtatgaaatataaaattcattggttgtataaaacgaagcgcggattgcagacggaattaacaacagagtatatgaacatagaagaaatacttcaatttgcagaggattttgagaaaacaggaagagtaaaagaattttcattttatgatgaaatggacgcagaatggtcattaaaagagatgaaaaagttaagtaagcaagtagaggaagagccccaagaaatactcgtttattttgatggggggtatgatgtgcaaacgaaagaagctggcgttggtatatgtgtgtattataaaaaaggaaatacaaactaccgcattcgccgcaatgcatatatagaaggtatagatgataataatgaagcggagtatgcatcactattatacggtatgaatatactcgaggaattagggattaaatatgaagcagttacacttcgcggcgattctcaagttgtattgcagcaattagccggagaatggccttgttatgatgagcatttaaaccattatttagatcaaattgaacaaaaggcgaagcaaatgaaattaaaacttgtatgtgaaccgatatctagaaaacaaaataaagaagcacatcaattagcaacgcaagcattagaagggacagtcattgatagtcataaagaaataaccgaatagagaggtgcaaaggtggataaaaagcaactcattacagaggtaaatgacttattagaaacatactgtgaaggatgtttcttgcgagaacataatcgaaagacaaatagtaagtattatgctcattcattttgtataagacaatgtacagttggagaaacattgaaaaagtatggagaacagttgtcataaaaaaacatccagagaaaattctctggatgttttttagtgctttgcttcgtttaattgctgctcgcatttgcttagtttcttttcctcgttcattaaaaatggttcatctaaatctactgcaacagatttcataatttcaagctgtgagcgagctgcttctactgcagtagtggcatgctctaatgtgtctggatccattgaaattgttgcagaacctaccatcttttgtgctgtttctacacggaattttacttcttcaaaatcatttacttctgatcccattgttactgcctcctttgtatattgcgcatttcacatagtttttgctctgtaaaacggaaatatacaaaggaataataaaggaggttaccaagtaaggtaacctcctgttatatgttggattaaagttttactacgttagcagcttgaggtccacggttaccttcagtaatgtcgaaagatacttcttgaccttcttctaaagctttgtagccatctccttgaatagcagagaaatgtacgaatacatcgtcagcgccttccatttcgataaatccaaaacctttttcgttgttaaaccattttacttttccttgcatgttataattcctcctaaaagcgtttactattttcatttagtgaaattcatttgaaaaataatataaactaaaaatgctatattcttgaatattctgctaaatgattaatttaaatatacacgaattgggagaatttagtcaagtaagcgattttattttttgtatttttaaataatttttcagtcgaatttttaaataggtataggacaggccgagtatgtaatattcttaattgaatgctatacataatgaggtgaaagaatgaataagtcttacttattagataatgaagaaatgagaacgagaaccgacataccggattgggttgcaaaagaatttgagattttttcaagtgtcgtgttagaaccaacttttccatgttatttcggtttaacagctttgaaaaagaatgaacttcgctattcatttctttctcataatgattggagtcatttgccacatacaatgttatcttttttagagttaatgaaagagaggccgattgtaagaaggggctttttcctttttgtagaaccggaatgtgaagaacaatcactcgaatattaccgtgattccttttggaaagtgctacagtatttacatgaaaacgataatcaagcatggccaaagcaaattcctgaagatccagatcattatttatgggaattttcatttggtggtgagccaatatttgcatttggaaatgcgccagcttataaacaacgaaaaactagacatttagggaattctctcgttattgggtttcagccacgcactatttttgatggattagagggagatcgtcctaaaggagcatattcaagacaaatggtccgtgagcgagttgaaaagtgggatcaattgccgaaacatcctaacattagtcattacggtgacccagagcatcgtgaatggaaacaatatttcataggagacgatgtagagctaataaaagggaaatgtccttttcttcataggatagaaaaataagagccatcatctggatggctcttttgtatattttggataaaaaagggtattttattacgaaagctagtctattttttcaaattatatcattaactagtaataaagagagtagaaaggatagagcgatgtttggagcaattatacagcaaatcgtattaggtatatcattagctgcgccagtagggccgattaatattgaaatgttaaaacgaggaattgaacgtggtttttggcacgcttgggttgttggaattggtggaatgactgcagatgttttatttatgcttctcatttatttcggtttatcttctgtgtttatgtatacatatgtacaagccttcatgtattgcacgggttttttcttgttattttatttaggatttcaaagtgtaaaacaaggaattttcgaatcgaatatggaatataaaaaagaagaggtaggtggccttaagcaatcgtttatggcaggatttttaattgcgatatccaatccattaaatcttgttttttggtttggtatatacggaagtacacttagctcattacttacgaaggtaacgaaacaagaagcttttttgtacagtctttgcattattgttggtattattttatggaatttaaatattgctttttctgtacattttggaagaactttattaaaaccaaaagcgcttggctacataacagccggagcaggtattattttagtaggttactctatacattttgcatacaaagctttacagttgttcacataagattgaaggggagatttttatgtatcgaaccactattgacggaaaagaaattataattacgttagcgccaaaaatccgaaaagaaattactgatagaaatccactatatgaagcggtatttcataatgctgcaagattgttacaaacaaagcaaccgacgtttgcagtaaatcatgaaatatttgggctcattattggagaagtgcaaagaggagaagtaacagtgtttgcagtggaacatattattccgaagcaaaatatatttggatcaaacaattttttctcggcaatagaacagcaggcaaatttgtaaagtgaatagaataagaatagaaaagaaatagtcgtaacgatatgttgcggctgtttttttgaaaaagggggaaacaagatgaagaaagtggggaaagagttctttttacaacatgatattgttattatgtatagcattctatttatttgcattattattttaaaaatgcaattttttacgtggtttggcatgttagcatgtatgtttgggattgttttctatacacttaatgaatatatgacacatcgttttttattccatataaagccacctaaaaacacatttctattaaaaatgttaagaagattgcattatgatcaccacgtatatccagatgatttaaaacttttgtttttacctgtatggtttagtatacctagttttactatatatttacttatagcatatggtattacaaaaagtgttactattgcactttcatttggaatcggaatgattattatgctgctcgtttacgaatggaaacattatattgctcatagaccgattcgtcccgtcactaagtttggaagatggctaaaaaaacaacatatattacatcattataaaaacgaaaagttttggtttggtgtttcaaatccagtattcgattttatatttggaacacttaaagatggaaaagatgttgagttaagcgaaacggctcgtaatttagaaaaggaaaaaaagacaaaagtagtgcgttaagcactgcttttgtcttaatgaggataaataagtaaggtgtcactttattttgaaaaagtatattaaaaatttaggggaaattgccgaaaaatgtctatcaaaaaatctttgcatgaatgcatggattgtctaaaatgaatataagtttctgaatatttataaaatttagtctttaggtatgcaagggggaagtgtattttaagtaagagaggggatcggttaatgaaacgagacgatacgtcagcacgtaagttgcaaaatgaggtgaattatacagaggtcgttcagtcggaagaatttcaattgttattaaatacgaaaaagaagtttatcattccaatgagtattttcttttttagtttttttatcgcattacctattctaacatcgtattcaaaggtgcttaatacacctgcatttggagacgttacatgggcgtgggtatttgctttttcccaatttattatgacatgggcactatgtatgatttatagcaaaaaagcagaatcatttgatgaaatctcccgaaaaattttgcaagatatgcaaaaagggaggggctgaacttgaatactactgcatttgcactatttttaattattgttcttggtacgctcgtcataacctattttgcatcgaaaaaaacgaaaaatgcgagtgaattttatacggctggagggggattaactggttggcaaaatggtttggccattgctggagattacatgtctgctgcttcatttctcggtatagctggagcaatcgcattaactgggtttgatggattcttttatagtatcggttttttagttgcttatttagttgtactatatcttgttgcagaaccgcttagaaatttaggaaagtacactttggcggatatgattgcagcacgctttgacgcgaaaaaagttcgcggagttgcagctcttaatacgatgacgatttctatcttttatatgattgcacaattagttggcgcgggtgcacttattaaattattattagggattgaatatacgacatctgtattaatcgttggaacacttatgacggtgtatgttatttttggtggtatgacagcaacgagctgggtacaaattgtaaaggctgtattacttatggccggtacgtttattatttctgttatcgttttcgcaaaattcaacttcagcgtgactgaaatgtttgcccaaatgaaaacagctacaccattaaaagattcatttttaaatccaggtgtaaagtataaggatggccttgatacactttctttaaatttaggactagtacttggtacagctggattaccacatatacttgtccgcttttttacagtacgtgatgcaaaaactgcacgtcaatctgtcgtatatgcgacatggttaattggtgcattttatattatgacgattttcttaggatttggtgcggcagcgtttgtaggaaatgaagcgattattaaagcgaacccagcgggtaatatggcagcacctttattagccaaagcgttaggtggagacttcttatttgctttcgtatcagcaattgcttttgcaacaattttggctgtagtggcaggtctcgtattaacggcagcatcagcattcgctcatgatttttataatgagatcattcgcaaagggaaatcatcggaaaaagagcaagtatctatggctcggtatgcatctattggagtagcgatattatctatcatacttgcattatttgcccaaacattaaacgtagcatttttagtatcattagcatttgcagttgcagcgagtgcaaatctaccagtgattttatttacaatatattggaagcgttttaatacaacgggtgctatttcaggtatgatcgtagggctcgtatcagcaattgttctcgtagcgttgagtccgaatgtttggaaccctgtagctggaaaagctatttttgttggggaagcgatattcccatatacgacaccaggaattatttcaattccgctcggatttcttgcagcatatttaggaactgttttatctagtaagaaagaagatgcagcgaaatttgatgaaattcttgtgaaatctaatactggtcacggtattagtgatgcgtcttcacattaaataaaagaggagcttttcgatagataagaaaagctcttttttcttttgtcattttcttgtaaatattactgatttgtaagtaggatttgtcttaattttgtggaatgaaaatagcagggagaaatttaagtcatcatggcaccagcgcagcttttgtgaaaaataagttgttatggaaggtggaagtaatgatgaaaacgaagcaaactgatgaattattagcaaaagatgagcaatatgtttggcacggaatgcgtccctttagtccaaatagtacaatggtaggggcaaaagctgaagggtgctgggttgaagatatacaaggaaaaagatatttagatggtatgagtggtctttggtgtgtgaatagtggatatggaagaaaggagctcgcagaagcggcttataagcaattacaaacattatcatactttccaatgtcacaatctcatgaaccagctataaagcttgctgaaaaattaaatgagtggcttgggggagagtatgttattttcttctcaaatagtggttcagaagcgaacgaaacagcttttaaaatagcaaggcaatattatgcgcaaaaaggtgaaccacatcgttataaatttatgtcacgttatcgtgggtatcacgggaatacaatggcgacaatggcagcgacgggacaagcgcagcgtagatatcaatatgaaccgtttgcttcaggctttttacacgtaacaccaccggattgttaccgtatgcctgaaattgaagggcagcatatttatgatgtagaatgtgtgaaagaagtcgatcgtgttatgacgtgggaattaagtgaaacaattgccgcttttattatggaaccaattattacaggcgggggcatattaatgccaccacaagactatatgaaagctgttcatgagacgtgtcaaaaacacggtgccttgcttattagtgatgaagtaatttgcggtttcggacgtacaggaaaagcatttggatttatgaattatgatgtgaagccagatattattacgatggcaaaagggattacgagcgcatatttaccattatctgcaacagctgtgaaaaaagaaatatatgaagcatttaaagggaagggagagtatgaattcttccgacatattaatacatttggtggaaatccagcagcttgtgcattagcccttaaaaacttagagattatggaaaatgaaaatttaattgagcgatctgcgcaaatgggttcccttttattagagcaactaaaagatgaaattggggaacatccgcttgttggggatattagaggaaaaggtctattagttggaattgaattagtaaatgataaagagacgaaagagccaattgataacgacaaaatcgcaagtgtcgtaaatgcttgtaaagaaaaagggcttattataggacgaaacggtatgacgacagcaggatataataacgttttaacattagcgccgccgcttattatttcaagtgaagaaattgcctttgttgttggaactttgaagacggcgatggaacgtatttaataaatagagagaggagcgagctgtaatataaggctcgcttttgttttttagtaggaggggacttttaatggagaaatatgatcctaacaaacattatcatatcggatattatgaagacggatatgatttagaagtgacggcgtacaaaagaataaatgaaccagtttgggatgcttatcttccgcactatgaggtagacgatttttacaaaaagtggagaaaatgaagctaggtgaatatatagatgactatggtattaaagtatattcatttagtaatgacatcgatgatgaagaagcacgaactatttttgaaaactggttaaaaacgaatggaattgtttaaagataaaatgaaaaaggagattactatcttgtaagatagtaatctccttttcttattcttatagtaaatttacttacttacttacttgcttgctttcattgctttatcttttgcaccaaaagtgtattttaacattggtggtgtaatcattgtagttaaaataacgacaataacgattgctgtaaagtaatcttgtgccaatagacctgaagaaagtcctgttcctgcaatgataagtgcaacttcaccacgagaaaccataccagaaccgataattgcagaagacttagcatcaaatccagtcatgcgtgcaccaacaccacaaccaattagtttcgttaatacagcgattactgttaatgctaagatgaaccaaatttgattgccaataccgtcaaatgtaatattcataccgatactaacgaagaatactggaacgaacatagcgtaagcaattggttctactttcttttctacttcatgtttgtagtttgtttgagaaattgcaataccagcagcgaaagcaccgataataccagcaattcctaatagttcgccgaaatatgcgaatgagaaacagatgataagagctgcgctcacgatagactcagatacgcgcagtggtgacaaccaacgcataattgctggaacacctttccatccaattaaaataatagaagcgaagaatactactttcttcaagataatcattgttaagttaacatcatcagtgcctaagaagctcattgcgaatgctaataaaataacaacaagaatatcatcaaatacagcggctccaagcatcgtcgtactttcacgtgttttcattttacctaaatcacgaagtgtttgtacggaaatactaacacttgtcgcacatagaagtaatcctaagaatacagcgtttccttgttccattcccataacaaggccggaaacgtaaccacctacgaatggaagaataatacctccgagtgcaactgctaaagaagaattacgattggcgtttaattcttctaagtctgtttcaagtccagccataaacattagaagaataaccccgacattacttaattgagttagaagctctgaattttcaatccaacctaatacagctggaccgataacgataccgacaattaatttacctagtacagaaggttgacctaatctaacactaagatcaccagcaagctttgtacttaataaaataagtgcaatttgaaagaaaaattcgaattccatctgatcctctcctcatcatttttagttttatcatacgatttctcggaatttgcctaatgaaaatatgtaaaacccattaaacaaaagggtctgattacgagttcttttgaacttgtaatttgaacctgtaattaatatataatatattttgcaaaaaatcaatgaaaaaatgggagcttttttagagagagacggtgttattagagatatacatataagaatagtgtgtgaatttttatatgtatgaaatagtatgaagtcctttttcattacaaataataaagcctaaatgctatttcacgaattataaatgtgaaaaggaggttttatcatttgaattcattaaaaaataacttgtctattgttgctttaggtggagtaaatgaaataggaaaaaatatgtatgctatccaatatgaaaatgatattgtcgtcattgattgtggatctaaatttccagatgaaagtttattagggattgatttaataattccagacgtcacatatttgcaagaaaataaagaaaaaattcgcggtttagtagtaacgcacgggcatgaggaccatattggcggaataccatattttttaaaacaactaaatgtaccaatctatgcaacaaagttaacgttaggtttaattgaaattaaattaaaggaacacaatcttcaaaatgatacggaattaatcgttattcattcagaatcagaaattgattgtggttctattaaggcaaccttttttaaaacgaaccacagtattccggattgtctcggtattgtttttcatacaccagaaggtactgtagtacatacaggtgattttaaatttgatttaacaccagtaaataatcaacatcctgatattcataaaatggctaaaataggaagtgaaggtgtactagctttattatctgaaagcacaaatgcagaacgcccaggttttactccatcagaaaggtcagtaggagaacgggtagaggaaatatttatgaaagcaaatagaaaagtaattatttctacatttgcttctaatgtgaatcgtgttcagcaaatagttgaagcttgcataaaaacaaatcgaaaattggctttgctcgggagaagtatggtaaatgtagtagaagttgctctagagaaagggtatttacatattccagacggcatgttgattgaagcgagtgagataaatcgtttagatccaaagcaggtagcgatactttgtacaggaagtcaaggagaaccgatggcagctttagcgcgtttagcgagtggaaactatagacaagttgatgttttaccagaagatacggttattatagctgcgactccgattccaggaaatgaacgtaacgtttcaagaattatagataatctatttgctttaggagcaaaagtaatttatggatcaggtagttctactggagtccatgtatctggtcatgcgtatcaagaagaattgaaattaatgctcactttaatgaaacctaaatattttatcccaattcatggagagtttagaatgctacatcaccatagtttgttagcagaatcaattggtattgaaaaggaaaatatctttatcgtacgtaatggagatgttgtagatattagtaatgaagtggcaattcaatctagaagaatacaggcaggaaatatatatgtagatggattaggaattggagatgttggaaatgcattattacgtgatcgtaaacaactttcagaagatggaatgctcgttatagttattacttttaataaagtggatggagaaataatttcaggtcctgatattatttctcgtggatttgtctatgttcgtgattcagaagaatttttaagagaattaaataaattagctgttattacaattaataatttaaagaaagagaatgtgaatagctggggtattttgaaaagggaggtaagagaagcgttagggaagtatatatatacaaatacaaaacgaaagccgatgattcttcctataataatagaggtttaatagtaaaaaaagaattctcgtatgggaattcttttttgttttgaagacaaaatgaacatataatgaaataaatagaaatggaaggaaataaaagatgttattaaataaacgttttacaattggagaaatggcaaaaatgcataatatcgcagaatctacattaaggtattatgatgaaaaaggaatttttcatccgtccattgttgatcctcaaacgaattatcgttattatacaatcgatcaattttcactattagatacgattaagtttttacgccaattaaacattccattaaaggaaattaaaaaatatattgatgaaagaaatccagcatacgcactcaatttactggaaaaacaacaagagatgatgctgaagaaacaaagagaaattgagtatgctttagcgaaaatggagcatagaattcatttaattaaggaagcaacaaaagcaaaagctgaacaaatggtaataaaagagatcccgcagcgaaaaataacagctattgcggttgccccgaatacgacggatgatatgtttgagtactacattcattcgttgcaaaaaaatatgaggcaaatggatgatagcttattttctggagatattggtgtaactgttgcgaaaaaagggttaatgcaaaatgagtttcaagcatatagcagtgtatttattcttttggattatatgccttttgaagtacagagttcagatgaaattaaagaaggtatgtttgcctgtgtatatcatcatgggccatatgaagaaactgatgaaacatataagaagctaatgaaatatattgatcaagaaggatacgaaataagtggagatgcaattgagattgcattaattgattggtctgtaacagaagatcctgaggagcaagtaacagaaattcaaattcctataatgaaaaaacaaagcaataagttatagggctcgtataattacaaatgagcatcaaacgcgataattaagtcacctattttttaattctctattgaccttaaagttacttgaaggtttaaactaagaaaagagagttgaaaaaaaggagcatattagagtatggaagcaacagaaaaattaagagaaaaaccaattaaaagcttatttatttcttatttaataccagcagttcttggaatggtattaatgtcagtgaatattgtaattgacgcggttatgattagtagaggagttggggcgaacggtttagcaggagtgaacgtggctattccagccttttcgattttcttctctatttcattatggatcggaatgggcggggcaacgttatactccattgcattaggtgaaaataaacgagaaagagcaaggtctatttttactcaatcaatgacggtagcagttgttatcgtagggattttagcagcgatttgcttatggagaatagaagatttagcatacttatttggtgcaaacgaagtgattctaccatatgcgttagactatttacacgtattattaacatttggaatgatatacgttttagaaaatattttaagtacatttatacgaaatgatggaaatcctaatttagcaatggctggtcttgttgtaacggctgtattaaatatagtgtttgactatatctttatttttatctttggatggggcgtaacaggtgctgcctcagcgactattctttcggcagcgattggtttccttgtattattaacccatttctttagaaaaagtagtattttaaagtggacgaaatttcattttgaatgggatactgtcaaacaaattatggtgattggtttcccaagttttacagcagaaagtacggttgcaatcgtaacgattggttttaatatcgcatttgtccaatatgcaggagaagtaggagtagcttcctatgcgatggtgaatagtattcatgcaatgacattactattattctttggtgttggagcagcattacagccaattgctagtttccattacggggcaaatttatcagagagacttcgtgaaggattgaagtttgctgtgaaaattgcagttgtccttggaggcgttgcgataattgtcggattattcttcgggaaatatatcattggtttatttgatgttcaatctccagaattattggagttaaccttaacaggtattagtttattctttatccaatacgtatttttaggttataacattgtgtatggagagtacttccaatcagtgcgacaaacgaagaaatcagtacttattataatgagccgaggattactatttattattccattgttatggattatgccgaaactatttggtataaatggaatttggctcgttatgccagttgcagaagtaatgacagcgattatcgtatttacgatgaatcgtatgaaacatcctgttccattaaatatggcaggagagaaagaagcgatatgataaaaaatccccttaagcaattaaggggattttcttattcctttaaactaatagcaaaagatccatccgtttcttgaacagaagcaaaggcaacgtttttaatatttgtaattcctttttcttttaattctttatataaccatttttcatctttatgtattaactttaagttatcatattgaatttgtgaatcgacgataagtgcaattggtaatccagcatacttaacatctatgtttaaatcttttggagttaatggtacaagttctctttttggtaaaatactaatagcgccgttcgcttctaaaatagcgtattcaatttcatgaacacttggatatcctgcaacgcgaagattagaaagcagttctgcaatggggtatctacttttttgtaagttctcaaaaataatatcaccatgtttaattaaaatgatagggtgtccgagaataaaacgatttagtttgttgaataggcttaattttgtaaggagtaaatgtaaacatgtgataacaaccataccgagaaatgcttgtaaagcaccagagacgggtatggcctggaaagctaaataagataaaaaaattatagccccaaaatcatgaggagttagttgcgctaacgcggatttaccgagtaacttaagcgatagcaaaaataagatgaaaaagaacgacacgttacataaaaagagaagcaatagagacactccttcgtgtaaagttgtacttactattcccgaaagtaatataaatattacctttcagaggataaattagggtttattggaatttgtctgtatacaaacaaataaatggatattatcatgaaggaagtaaaagaaaataggagtatatgaatatgagaaagaagaaaataatgaagggcattttagttgttataatgatttgcgccgtgtatgcggggtttttacaatatcacatttataagcatgggcatatgaatgcaacatacgatgctgattacataattgtactaggatcgaaagtaaatgggacgaaaccatcttattcattgcaatatcgtattgataaagcagctgaatatttaaaatcacatgagaaaacaatcgctatcgtatctggaggacaaggaaaaggcgaagacatttcagaagcattagcaatgaaacaaggactaataaaacaaaatatcgcagaagaccgcattataatggaggacaaatctacgagtacagatgagaatattacattctcaaaaccgttaattccagccgatatgaaaaaaggtatgatcgtaacaaacgattttcacatgtttagagcgaaaaaaatagcggccaaacaaggtttacaattagaaggtcttccggcaaaaacaccgaaaccaatcatcattccatcgaatgtacgagaatatttagcaattacacagtattggtttatgaatcgaatatagtgaaagtgatcccgtctgaaactcaggcgggatttagtttgaggaaaatcttacaaatatgtcacgttcgtgaaaggtaaagcgatagtttctagaatgatttcctgacataatgaaggtaacaaaaactatttagaggtgaatcggatgaaaggaaataatattttatcttcgttatgttactttagtatcttttttgcaccatttttactaccaattatcgtgtactttgttgcagaagatgaagtgaagtatcacgcgaaaaaagcattttggtcacatgttttcccatacgcaatcttatttggaggactagcagtatcaggcatgtacggtttaggtttcaatcaatctgacggtgctggaattggaatggctatcacatatgcagtgttcattcttgtaggaatttactacttcatttggaatatcgtaaaaggtattaaagttttgaaaacggcgtaataagataattataatttcatttaccgtatcgataaacgttttaaaaaagggcaattcaaaaagaattgctctttttgtgcttataagttgtgaaaattgaaaaagatatgttaatttttcattatgaagagaaaaaaggagtgattttcatgaatgagatcatacataagatggagcaacatgtttcagttcgtaaatataaagaagaatcaattccgaaagatgtagtagaaaagatggtgcatgctgcgcaacatgcagcttcatcacattttgtacaggcgtattctgttatatatgtaacagatcaggaattaaaggctaaactagcagagctatccggaaatcgccatgtgaaggactgtgcagcattttttgtttgttgtgcagatttaaaacgacttgaaattgcatgtgaaaaacatagtacagagataaagcatgagggagtagaagactttatcgttgcgacggtagatgcttcactttttgcgcaaaacttagcactagcagcagaatcgttaggatacggtatttgttatattggtggtattcgtaataatccgagagaagtgagtgaactgcttcatttaccggataaagtatatcctgtattcggaatgacagtcggtgtaccagatgaagaacatggagttaaaccacgtttaccagtagcagcagttcttcatgaaaatggatatgatgaacaaaaatatgatgaattactaaacgaatatgatgaaacgatgaacgcgtattataaagaaagatcatcaaacaagaaaaacgtaacatggacggaatcaatgagttcgtttatgtctaaagaaaaaagaatgcatatgaaagagtttttaagtgaaaaaggattaaataagaagtgagtaaagaggcaaacctgtgatgcaggtttgcctttttgagaaggagaaatacctaaggccagaaagttgtttattctttctgaacttaggtattttgtttgttatcatgtacatagaaataaaaattaataattttttacaaaagtgatagaaaatgagaatgaaatgccaatagtaagtaaaagcggcataatagccgctttttatcgttttatttagtatttgatttgaaatattttccttatgaaagaaagattattgctaattgtaaactgtcaataaagttatttaagttttgatatggaataccccgccggaaaatacagcaataatttcgtttgaacatatctgttattgcacgatctaaagcatcttctataacaagttcaaactttcaataagaagataaccccctgtacaacttaaaagaatgtacgtaaatattttaaaaatccgttgattaagccatttaaaaataatttgacctataaacaaacctaaaaatacaattggaatggcataaaaacttgattcccaaatggttttgtttgtgccagtaaagagtatttgagttactagactaatgaaatatataaacagataaaaagctaatgtagttgctcttaacttctctttttcagtattagttcctgtaaaataaagtaacaggggtggacctggcataccgatacttgtcgttaaaagaccagataatccgccagctatgaaatctctagattgtgttgatttaaccttaacgttgcatattagcaacaatgttaatagtaagagtaggatgctaactgctaatttaaaagtgtttatgttaacggaaatgaaaattaaaatgccaaaaggaacaccaactatacttccaaaaataaaccttttcagtagaacaaaatcaacgtccattcttattttccaaatgagtgaaatggagataattaaagataaaataatgtttatttgtatagcttcttgtggtagaaataacataagtaagaaaggggttgccattatggaaaagccaaaacctgtacttgcttgcagaatagaagccactaatataatacatatgaaaaagaatgtgatacccaaaacagccctcctatttaatcaagtttaactagttaaagtctattatttaagtgcaatgtttcacaaacttatttgtattttaacataaatatctagttttttctcaaatagtgttgccatataaggctctttaactaaaaaatctgacttgtatttttaaacaattttattatggggaaacaaataatgaatgggatcaaaatgtattgattatcattaaattattcactgagatccccgcgataaaacaagaacagccatataaaacttacaaaaatacagcatgtagctaataaacagccaatcatttgaggagaaagaatttctaacagccctcctgtaaaaaacatcgataactgaataagagatccgtaaatggaataatggaatgaaaaaactttacctatcatattttcgtgtgtgtaagtttgaagtaatgtcgtatcaagtggaacgatgattcctcctgctatgcgcatacagaataaagtaatgataccgataataagttgatcggatagaatgaatccgagaaagaaagttccttgtaataagtaggcccaaccgaatacttttttcattttttctttattatgggatatataaagattaacgagaaggcttcctatcataagcccagccccttgaaccgtatataaaatcccaatgttcgtatggaaaattttttcggcatagatcgttagaagtagttgataagcacctccaataatcccccatgaaatgccgacaagaattaatgttaaaatgatttttgtttgtaatatgtatgtataaccaccttttatatcagtgaaaaatgctttcttcttgttacaagtatcatgagcaggaatactcatgttataaataaaataggctgaaataaagtatgataggctatttactaaaaaagcgaactcaatatgtaaagattgtgcaattactccgcccaaagaagcccccataatagacataaaaccattaattgtactagaaagagagttagcagttacgaaatgattttggtgtacgatattttttagggttgcttgtttagccggttcaaataaacaagaaagtacagataaacatatattagcaatgaaaataatctcaattttatagcctgcgagtaagtatgtaaggactagaattccccgtgtaatatcggtaaaaatcataatattctttttagagaaacgatctacaattccgcctatgaatggactaagaagaagctgtggtaaacttttacttataaaagtaagtgcgatcataaacggcgattccgttatgctgtagacaaatgttaataaagctaccgtatggaaccaatccccaagtacacttaatgtttgcccataaaatagtttattgaagtttttatttgttttaagaagtgtggaataagaaactgacataaatagattaatccttatgtaatgacgatgtttgaatttgttctttccactcacttaaatacactttttccgctgtgggaagtccaacaggtaattgtgcaatcaattctaaactatttccatcagggtcgttaaagtatacggctgcatgtgctaattccggaaaaacaatcggttcaattggttccattccaaagtcttttcgtgctgaaattcctttttgatttagccaatgaatcgcattttctaaatcatgtaaacttacttgaaaggcgatatgtcgtaaagaggggtgataattcactttgtattctgtgccttcccaaaggccgagccaactctcattttctttaatccaaaagaaagcaatattatctcctcttttatataattttagccctagtgattcataaaaaggtattgatacttttaagttgcggacaggtaaatgtgcttcgtaaagacctctaatcattgtaatcccccttagtaaaaatgtttcttattccatagtaaacaatatgttgctagttgaaatcgcaaataagagggatataaattcatacgaaagtatgaaaaaaacagctcatatttgagctgtttttctatagtttttagttcatttttcaaggataggatatattaatatccgtatccgccgccaccccaacagctacatccgatgatgattagaaggatgaatagtacgataagcaaagcaaatccaccgccgaaaccagcgcaacttccaccataactcatatgttttcctcctttttagtaagttaatctatatggttcatggactactatatacagtatgttttttgtatagaaaacgagccagtctcatttataattagacaaatgcctgtagattcattaggattgcatgttagtgatttgtaaataaacctttacgtaattcataatttaggcataaaaaataaaaaattgtaaaaaaaaccattttcttatttttttatgagagaatatgtactataattttacaagtaatattatgggaaaagggagttttagtatagagatggagatgggacaattaaaaaataaaatagaaaacaaaaagaaagagttaattcaacttgttgcgagacacggattggatcatgataaagttttgttatttagtcgtgatttagatatacttattaataagtttatgaatataaaagacaaagtgcataaataaaaaatttatagttttttatattaagatgtttcacagaaaggagaggacagtaattggaacatttacaggaagaattgtataaacaaataaaagaagaaaaaggtacagttacaattttcttaaagagtggcgttagaataataggagaagttgttggagtggataaatttacagttttaatcttagtggatggaaaacaacagcttatttataagcaggctatatcaacaataatgaaataagacactcttgttgagtgtcttatttcattattgcttgcatgcctcaacatcaatgccggcagcaattaacttcttttctccatcttgttcaataattttttgtaatttagataagaaagaatcaaagtttgtatgctttgctacttggaacgtcattttatgttcaattggtagccacgtatcaatatcagcttcgttatgctgaatttttacctcaagtttatcgagtgcattagcaacttttgcttcgtacgtttctttcgcttcaaactccatccataagtcatataattcctcgccgagagaacctgttaacgtttgtttaatatttaaaatagcctccagttcatttttttgtttttgtagctgtaattcgtgactattcattgtatcaaaagcaggaatatcaccagcttcggcttcgactaggtcgtgaataataaccattttaagtaatttctcaatacttactttttgatccaaataaggttcaactaaaatggccattagagacatccgccatgtatgttcggcaacactttcttgacgtccgttggaaagccagctatgtcgcatttcatattttagtttttctgctaatgcaatgacttgtaaaatgttgtgttccatcgtgatcctcctcatttattcataccataattctaatatagaaatgaaatgtgtcaattttatgagtatattgcgataaacagatgataagcgtataatacatgttatatgtgaaaacgtattattaaaataaaaaaatgttatataaaaatggaaaggaaagggcagaaatatgggagagaaaaatcaagtattagctagaccacaaagaagaaaaaggaagtttgatatttctagcccagtgggcattatagtaggtttcattatagtgatagcggcaattatgcttggtggcggtggaataaaagctttcaaaaactttttagatatttcatctattttaattgtcatagggggaacaacagcgacaattgttgtggcatatcgatttggagaaataaaaaaatatacgaaaagcatttttactgttttacatagaagagaagaagatttagaacagttaacggatttgtttgtcgatttttcgaaaaattctaaaaagaacggcttgctttctttagaggtagatggagagcaagtagacaatccttttattcaaaaaggaattcgattaatgttaagcggttacgatgaagatgaattaaaagaagtgttattgaaagatattgaaacggaagtgtatgagttaagaaaaggagcagcattattagataaaattggtgattttgctccagcttggggaatgattggtacgttaatcggtcttatcattatgctccaaaacttacaagatacatcgcaaattggtacaggaatggcagttgcgatgttaacgacattatatgggtctgtacttgcgaatatgattgcaatccctcttgcggaaaaagtatatcgtggtattgaagatttatatacagagaagaagtttgtaatagaagcaatttcagaattgtatcgtggacaaatcccttctaaattaaagttgaaactggatacatacgtatacgaaacaaaggtaaaaaaggtaaaaggagcagcctaatatttcaaggagtggtatgatgagtaaaggaccgcaaaagggatcgcctcgttggatgacgacttttacagatttaacgatgttattattaactttctttgtattactagttgctacatcaaagcaagatgcagtaaaattgtcaaagatgcttgaaaagtttagtgatacggggcaagtagatgcaaaagtaatggaaaatacaataccggatatttcacatgaaaaaaatgatgaaaaaatgatttcaaaaaagagaatggatgaattatataagaagttaaaagcatatgtagataataatggtattagtcaagtgaatgtatatcgagaggatacaggggtaagcgtcgttatagtagataatttaatatttgatacaggcgatgcgaacgttaagcccgaagcgaaagggataataagtcaattagttggattttttcaatccgtacctaacccaattgttgtagagggacatacagatagtagacctattcataacgagaaattcccttctaattgggagttatcttcagcacgagcggcaaatatgattcaccatttaattgaagtgtataatgtggacgataaaaggctagctgcggtaggatatgcagacacaaagccaattgtaccaaatgattcaccgcaaaactgggaaaaaaaccgtcgcgttgttatttatataaaagagtagtatattattattttaataataaaataataaaaacacgaaaattcttttaaaaaaatattaaattttatcattttattttgtataatgagtgagaatgataaggtgaaatattaagatatatttatacatagaaggagagaattaaaaagaatggcacataaaattttagtagtagacgatgcgatgtttatgcgaacgatgattaaaaacttattaaaaagtaatgctgaatttgaagttattggcgaagcagagaatggggtagaagcaattcaaaagtataaagaacttcaacctgatattgtaacattagatattactatgccagaaatggacgggcttgaagcattaaaagaaattattaaaattgattcaagtgcaaaggttgttatttgttctgcaatgggacaacaaggtatggtattagatgcaattaagggcggggcaaaagactttattgtaaagccattccaagcggatcgtgtaattgaagctttaacaaaagtagcaaatagttaatatagaaggggtgccacaaggaatcaaaacagtgatagcggatcgacgtgtggcccccttttttctcattgtaaaacactaaattgttatacataaatgaaatgtttgttagacaggtaggggataaaaatgcaaacagatctattaaatatatttttcgaagagtcagaagaacatttacagtcgctaaatgaaaatgtgctagtgttagaacaaaatcctgctgatatggatgttgtaggagaaatattccgatccgctcatacattcaaaggtatgtctgcgagcatggaatttacggaaatggctgatttaacgcataagatggaaaatgtgttagatgaaattcgtcatggaaatatagttgtaaatgcggatattattgatgtgatttttgagtgcattgataatttggagaagatggttgcagatgtgcaacaaggtggaatgggcaatattgatgtagcctcaactaaacagaaattagaagcattattgaacggcaatgtagaaactcctacggaacatatagagcaaaatcatatagacacggatgatgcagtttcgcatgaagtgcatataacagttgaacagcaagcaattttaaaagcggtacgtgctattatgtgtattgaagcattgcaaaatgtagggaatatacaaaaaacagctccgagtattgaagaaattgaagcagatgctttcggatttgaatttacagtatttatggatactgattgtagtatagaagaattgaaacaagtagtacttcatgtttctgaaattgagaaagtggaagtaaagcaaggagaacctatatcgaaggaagtagcttctaaaaaagtcgttacacaagaagttgtgcaagtagaaggaaagctacaaccagctgtggctacgcaggtagaatcaccaatagagccaacgaatcaaccttcaagtgctatgccagctaaaagtactacaaaaacgaaaaatgctaaagtggagaatcgttcaattcgtgttcaattagagaaaatcgaaagattaatgaatatgtttgaagaaagtgtaattgaacgtgggcgcattgatgaattggctcaaacgattcaaaacaaggagctaattgaacatttaaatcgattaggcgatatttcaaaagatattcaaaatgtactattaaatatgcgtatggtgccgattgaaactgtgttcaatcgtttcccgcgtatggtacgtatgttagcgaaagatttagggaaaaaaatcgatttacaaattacaggtgaagatactgaagtagataaaattgttattgatgaaatcggtgatccgctcgttcatttaattcgaaatgcaatcgatcacggtgttgaaactgttgaaaaacgacgtgatgcaggtaaaaatgagacaggtacgattaaattagaagcctttcatagtggaaatcatgtcgttattcaaattacggatgatggaaacggtattaataaagggaaagtattagaaaaagcgattaaaaatggcgttgtaactgaagcagatgcgaatagattaacagatcgtgaagtgtttgatcttattttccaaccgggatttagtacagctgaagttgtatcagatctttcaggacgcggtgtcggattagatgttgtaaaacatacgattcatagtttaggtggacatttaattattgattctgaggaaggaaagggaagtacatttagaattgaacttccattaacgttatctattattcaatctatgcttgttcaaacgaatgataagcgttatgctttacctcttggaaatatcgttgaagcaattcgaattaagagagaagacatccaatccttacaaggaaaagatgtattaaattatcgtaatcaaattattgaagtgaaacatttaagtactgtatttggtgaaaaaacagtagatgaggcgtttgcgtcatatgatggtcaaatggttcctgtgttaattgttcgtaacacacatcgcagctatggacttattgtaaacacaattatcggtcaaagagaaatagtcttaaagtcattaggtgacttctttgcagagagttctaactatttctctggtgcgacgattctcggtgatggacgagtgatcctcattttaaacccagaaggtttataataggaatgaaggaaagctccccacttgtatacaattggggagctttttggctaatcgttacgaatctaataatgggatacatagtaacgttttatactaatgagtttgctaaaataaaataagagtttatattatttgatagaaaaacagaaatgaggaggcagggaaaatgcctgagcaacacacaaaaggggatacgagcacgattgtgctagaaaaagaaaatgagcatttaacgccccaagaatgcgatattcttggcgaaattgcaaatatatcatttggttcagcttcgactgtattatcaacaattttaaataggcaagtaagcattactgctcctcgtatagagttggtagatttatatgattcaagagatgtcgaagttccacatgttgtattaaacattcattttacaaaaggattagatatggaaaaccttcttgttcttaagcaagatgttgcattgtccattgctgatttaatgatgatgggaacaggtgaagtcgaggacggaaaagaacttggtgaattagagctaagtgctgtacaagaagcgatgaatcaaatgatgggattcgcagctacatctatgtccgaattcttccaagatacagtagatatgtctccgccgacgattaaagttgtaaagttatcagaagaaatggagaaaatctctgaaatcgatgggaatcatacgattgttaaagtatcgtttgatttaaagatagataatcttgtaaactctaaacttgtacaaattgtttcagttgagcatgcgaaacaaatggtaaataaattaatgcaattatctggtggagtagaagaaacagacgaaccagcagaagtagtggaaactgagattgtagaagaaaaaattgaaaaagagcatttaacacaagaagagaaagatgttcttggtgaaattgcaaatatttcaattggttccgcttcaacagtattgtcaacacttttaaatcagccagtttcaattagtacaccaaatgtagaagcaatcaatgttcgtcattatgatggagtaccagtaccatttgttattttaaatgtcgactttgttgaagggctaaagaatgagaatgtatttgtatttacgaaagatgttgccttaacaatggtagatttaatgatgatgggaacaggggaagttgacccagaaaaagagcttactgaattagaactgagcggtattaaagaaattatgaaccaaatgatgggtcatgctgctacggcgatgtcagaaatgtttcaagaaaaaatggacatgacgccgccaaatgttaaatttgtaacgttaaaagaagaaatggaatatttgggagagtcaatggaagtggacgaactcgttcaaattacgttcaatcttgaaattggcgatttgcttcaatcgaagatgtatcaaattttgccaatttccgaagcgaaagaaatggtaaggcgacttctgtatccgatggtggaagaagaagagattgccacagaagaaattgaagaagaaaaaattgtagaaccagttgtgcaacctattgaatttaaagaagtaaaacaaatggaaccagtatatatggacacgtccattctacaaaatgtagaaatgaacgtgaaatttgtatttggaagtacagtgaaaacgattcaagatatattaagtttacaagaaaatgaagcagttgtactagatgaggatattgatgaaccgattcgtatttatgtaaatgatgtattagtggcgtatggtgaacttgtaaatgtagatggattttttggagtaaaagtgacgaaatcactataaggcattgaaataggagtttgaactagtagatgaaaaacgtaaagttttttctaatgagttggctatgcatacatgtgtgcttgttcttccccttgcaaagtcaggctgaggaacaaattgagtcagatcaaaaaataaatgaagtgaatgtacaagaagaaaataaggaatctcaagaatcgtcagaacaagtggaaacgaagcaagatgaagagaaacaaaaagaagcagagcaacaagaagtagtaaataaacaattgaatgaaagaaagatagaaacagaacaaggaattattacagtaaataagccggagcttaaagttggcgaagaagtgcgaattgctgtagaaccaaatgtgaaaaacattcaaagcatgaaaggtatattgcagttacaaaaaaatggcgagcaatatgcgcaagaaagaatactatcttttgagtatgatgaagaaacgaagatctgggttgctaactataaagcaggggattttgatttgcaaggtgattggaatcttcagctcgttcaaagttacaaagagaatgagaaagaagagctcataaaaaatgaagtgaaagtcccgctcattcgtattaaaaatgaaacgccaactatagataaagaattgccaaagttacagaaagttactattgatgaagtaaaagagaacttagttgaacgaaaacagggagattctatacatatacgagtaaaagcgtcagatatagaatcggttgtaaaagaagtgcgcgttacattaaaagggaaagaaaataaagagctttcgtttttattagactacaacaagcatgatatggattggcaaaaagtatttgaaataacagaagcattgccggctggatcatacgaattacttgtagagataatagatgcagcaggtaataaacttgttgaagaaagtgaatataccatttctgttttggcgccaaaaaacgaagatgataaaaagatagaagagaaagaagataaattagataataaactagaaaatgaattagaagataagaaagaaaatgagaagcaagaagatttgaaaatcaaaaacccgcttccagaagaaaaattgccagttgttcaaattccgaagcaagatgagaaagtaaataagtttataaaagaaccgttgaaagagaaagaggaatttacttacgttataaaagagccgttcgaagacaacaaggaagtacataaggcgaaggaccaaaaagagaaaaataacaaacaagttgtctctaaaaagaaagaacaaaaagaagaaacgaaagacaaggaagaagaaaaaggtgaacagggagtacaagcttcggatgtatttactatcatgtcaggtttattcgtactgtttttagttttaaagagtaataaagaatggggctaattatttcatagtagtggaggcgcttaaatggagattaaacgtacgacaattgaagataagacgctacaaccattaaaacagcctgcagctatttcggaacatgaaatccagaaagaacgaaagcgtagcaatttagtgtttactggacagtctaaaattatttcgaaaaataatgaaataggtattttacttgcaagtttaagtgatggaaagattatgaaggaaatactttctaaagagatggatacggtgttacaactttttaaaaagttacatacattatctcaagaaggaaagcaatcagaaaaagtgtttgaacaagtaattagaagcctacaaggacttattaagcaggcgcacataaaagaacttcctttgttagatggaacatatgatttcgctgaagtacaactatcatttggtagaaaagtacatattcctttactagatgtaagtgcactcatctctagagtggaaagtgattcctcagaaggaaatataaatttgatggtaacggttattactgcttatataacgaaattgtctaacgaaacgattttaattagcgttacagaccgcattgctaaagatcgggatgtaagtgtatggagagcgcttgcggaaatgaacatgacacaattatcacaggcattgaaacaaacgatgcaagaacataaatggtctatgacgtttctttttctcttcatatggattgtcggtattattttaattcgagttatgtaaaagaggtcgtcactccattgtgacgacctcttttatattttttcgtagaagaatgtatcaaatcgctgaagattgtaacgttcgggtgttaaaatttgttccgtactaccaacaaatagtacaccgccttttcgtaaagaacgactaaatttttcgtaaagttttattcttgcttcttctgtgaaatatatcattacattacgacaaataatcaaatcataatttgtatcgaatgactgcattaaaaggtcgtgttgtttaaacgagacgttttgtttaatgttttgatgcaatgaatatagatcattctcttttgtgaaatgacgttctttcaaatcagtaggtaattcctttaacgaacgttctgtatattgagcgcgttttgcggtttctaaaatatgaaaatcaagatctgttgcttgaatttcaaaacgaaatggagctagatgttttgataaaattaaagagagtgtatatggttcttcaccagcagcgcaagcggcactccatacctttaattttccgctattttgttcgagtaattttggtagtgctttcgactctaaagtttgccatcgttctttatttctaaaaaactctgaaacgttaattgtaatatagtcaataaaatttaaaaataaattttgatcagcgcgtaatttgtttaaaaaattagtgtagttttcgaagccttttctcgaaatgaaagcatcgattctacggcgcattctatcttgtttatatgaagcgatgtccatattgaattgttgtttaaaactcgctataaaatgatcgtaatcttgttcaattatcatatttacaatgggcacaataatgatattgtgcctccccctttacatcatacgaattttttgttcaaagctttttttcgtttgcttttcatgtaatcctggtaaatcataaatgacagcatcaatacctgcttcttttgcaacatcgacagggatgacagatgtatgtttgtcaccattataaaaacagagaactaaatcagtgtcttcaataatttgtttaacaaaaaacatataatctgatcggtaaatggagtcagaaggatgatcaaaagcaacatattcggctccgtgtttttttaagtaatcaacgacttcttgaaattcatctgttattgcttgcaatggttgcagcgtgtaaaggcataaattttgagcgagtctttcattctcaacgaaaaaacgaagaacctcattttcaatagatttataacataatatgtaaattttatgtttgtgagcatagtcagttaaaaattttttaatttcttcttgatctaatgctgttaattgatttgaaccacaaaggaaaatattcatagaattgtgccacctcatgctaaattgtaacatatcttttataaaaaataactgcaaaatattactgttcagagtataattataaataactggattttacgattaagtttaggaagaaataaaaaaaataaataggtgatatatatgctacgttctatctcgcataatccaattttatcgcatataccgcctgctactcaaatgccgaaagaagcaaatgtcaggacaggacttgcattttcggataatttgcatgcagatccgaaaaaagataaattactagaacaaatggaagcgtttgtcgataatattggagaaattaaagagaaaattgaaatggaattaacgcttgataatgtaatggaatacaaaaatacagtaaaatcatttttgaatttttacgtggataatgtattgcagtataaagatgtcatgtctcgtcacccgcgttacggatattcacagaaaatgacgattgtgaaacaggcagaaatgggattgaatgaattagaagatgttatgaatttaattaatacgaaaacaggacatttagaaatgttaaatcaaattggagaaatccatggtttaattgtgaatttagtcttgtaaaaggaaggaagctatatgtacatacaattatatgaaaaactcgttattattcaaaaagcgtatgaaaatattcaagcgcttggagagcaaatatatgagaatttaaaaaataaaaatgtaaatgcagttcaaaagttgcaagtagagcaattgcagtacattgatggtttaaaagggttatcaagctcatttgaagaaatggttgttcagttctgcaaagaacaaggggttgaatcgtttcgtgtaagtgcgttattttcgtatttttctcaagaagaaattgaaaaaatggaagaattacaaaaaaacgtaactgaattagaagagaatgtaaaaatgattcttttgaaaaatcaatattacttaaacgtactattaaaaactacagaaagtattgtggattctgtttctgaatataacttagagcgaaacaataattcgcaaatctttatgaatgaactattgtaaaggagaagtgaagctttatgagattatctgattataatacaccgctatcgggtatgttagcggctcaaatggggttacaaacaacgaaacaaaacttgtctaacattcatacaccgggttatgttcgtcaaatggtgaattacggatctgctggaggaagtaaagggtatgcaccagaacaaagaatagggtatggtgtacaaacgttaggtgttgatcgtattacagatgaagtgaagacaaagcaatataatgatcaaatgtcacagttctcttactatgcatatatgaattctactttgtcgcgagtagagtctatggtaggaacgacaggtaaaaattcattatctagtttaatggatgggtttttcaatgcttttcgtgaagttgcaaaaaatccggagcaatcaaattactacgatacattaattgctgaaacggggaagttcacaagtcaagtaagtcgtcttgcgaaaaacttagatacagtggaagcacagacgacagaagatattgaagcgcatgttaatgaatttaatcgacttgctgctagtttagcagaagcgaatcataaaattgggcaagcaggtacacaagtaccaaatcaactattagatgaacgtgatcgtattatgacagaaatgtctaagtatgcagatatagaagtatcgtatgaagctacaaatcctaatattgcaagtgttaggatgaatggtgttttaactgtaaatggtcaagatacatacccacttcaattacagaaggataaaaagccaatgtctgtacaaatatctggaacagatatcccattaagtggtggaacaattttatcggcaattgatacgaaagcaaagattacaaattataaagataatctgaatgagtttgtaaattcgttaaaaaaacaagtgaataatactatgaagaaagagttttttgtaggagaagatgcgaagaagcttgaattgaatcctgattttataaaagatatttcaaaaatgaaaatttcggctgaaactgccaacaaccttgcggctattacagataaaggctataaggatggacttacatataagcaagccttagatcaatttttagttggtgtagcctctgataaaagttcagtaaatgcatatcaaaatattcataaggatttattagaaggtatccagcaagaaaagatgagcatcgagggcgtaaatatggaagaagaaatggttaatttaatggccttccagaagtacttcgtggcgaattctaaagctataactactatgaatgaagtgtttgatagtttgttttcgattattagataaggagtagtcatgtatagttggtaattggaaatatttaaggaggagatagaaatgagagtatctacatttcaaaatgcaaactgggcaaagaatcagttgatggatttaaatgtgcaacagcaataccaccgaaatcaagtaacctcagggaagaaaaaccttcttatgagtgaagatccacttgcagcaagtaaatcatttgcgattcaacattcattggcaaatatggagcaaatgcagaaagatatagcggattcaaaaaatgtattaacacaaactgaaaatactttacaaggtgttttgaaatctttaacaagagcagaccaattaacagtacaagcattaaatgggacaaatagtgaaaaagaattgcaggctattggtgtagagattgatcaaattttaaaacaggtcgtctatttagcgaatacaaaagaacaaggtcgttatattttcggtggtgatagtgcaaaaaatccgccatttacagaagatggtacgtaccaaggtggaaaaaatgatgtgaactggcaattaaatgacggttatgaattcaaagcgttccgtaacggagaagcattattatccccggttataaaaacgttaaaacagatgagtgaagcgatgaaaaacggtgaccaaaaagcattaaaaccgttattggaaggaaataagcaaaacttagatggcatcattaaccgtacaactgaagttggttcgacaatgaacacaatggagacgtttaaaacaattttaaacgagcaaaatgtagcacttcaagaaaaccgtaaagaaattgaggatgttgatttagctgtcgcaatttctgatttagcttatataaacgcaacatacgaagcaacattaaaagctgttagtacgatgagtaaaacgagtattttagattacatgtaaatgataaggagtgaaaaatatggcagggacaatatctaattatggtgacagacagcaaatatggaatttaggaaataacataatagatacaaagaagttagtagatttagagttacaagcattggaaatgaaaaaatcaccatacactacacaaaaacaaacgttaacaaatgaaaacaaagtttatgcgagcatgaaaaaagagtttgcaaattttgtgcaagtattcaaagatttaaacacatttaaaggtgatgaaaagaaaacaactttatccaaagatggttttatgacagcacaggcggatgctgctgcaattcctggaacatatacaattacagtagagcgagtagcagaaaggcatcaaataactacagctccacttactcccccaaaaactcctgaaggtacggagcaaaagtttagtttagatttaaaacttggagtagatgatgtatttcagataaatggaaaagaagttaaaatctcaaaagatatgacgtataaagatcttgtcaataagataaataatgggaattatggtgcatcagtatacacattaggggatcaactatttttcacatcgactactgcaggagaaactggagagctgaaattaacggatggcgccaatggttttttacaaaatatagggttagttacttctgcgaaaaatccggatggaacgaatgttgttgcacatcaagtgacaggagcgataaatgctgagtatacaataaacggaattaaaggaactagtaaaacaaataagattgatacaattccaggattaactattaacttagaaaaggtaactacagagccaattaaattaactatcgaagattcagatataaaaaattcgatagatttaatcaaaaaaatgaaagatgagtataataacgctgttaaaagtttagatttattttctggtgaaaatggagtaatgcaagggaataatgtttcatttgctatcagtaatgcaatgacaagcatttttaaattttcacaagatgataagtatttattttcttttggaattcaaattgataaaacaggaaatatgactcttgatgaagaaaaattgaaaatagcttttaaagagaatccagaatctacaaaacaatttttctttggctttaatggtattggtcatgatatagataaaaagcttgagggaatctttggagatgaagggattatcggaaaacgctctaaaagtattgaaaagcaagtgactgatttagagagaaaaattcaagatattgatacaattaataagaaaaaacaagaatcaattattgataaatatgcaaagttggaaagccagctagcattgcttgatagtcagctgcagacaatcaaagcaatgacaaaaaccaaaagtgatgattaatgaaagttgaggaagtgattatatgcaagcatggcaacgttatatgcaaaatgatattatgacgagtaatccgattaaaaatacaatatttatttatgaaagatgtatcgtagagtttcgtaaattagaagaacttttaaatacatttaaacttcaagaaggagacgaccttcttgaaaagttagaacgtatatttgaagagttgaagcttcaattaaatcctgatatttcaaaagatttatatgacggtctatttggtttatacgattggattagcattcaaattcaaacgatgaaagtaacgcgtgaagcaaaagacattgatgcgattgtacaagtgttacaagatttaatagacggttaccgtggagcacttgaaaatgaacaatgatatttatcgaacgtttgtcagctgttttaatgaaatcggtgaattacaagtgtcagatgaagagtttgctgagaagagtgagatgttaaatcgttggatgatgacactagatgaagaaagacgtgcacaagttgcagcagaagtaagcccattcattattaaggcagcgcagcatattcgtgataagcaaaagattttggaagaaatgattatggaaaatgatgggcgaatgaaggctaattcattttacggtaaatattaataataacgtctggaaacagattccccttttaaaagggggtctattccttcgtttacataaagaactccgctgattgaggtttcattttatgactgtgatgaaataataattgtaatctaaataatagaaaaatggactttagtttgtagtttatatattgaaatgttctatagattactatgtgtatacagttttttgcattctttttctatatttttgtatttttctaaagacaacaatgaaaaaatggaataaaatatgtaagggtacataatagtaaatattttaataaacgcatataagaaaataaataatgaagtgaaacttctatcagtggatcattacgttagaaaaggaagggtgtggaatatgccagatttagtgagtgatgtaagccattatatgaattatttagtgacgaaacgaaatactgtttctagtaatattgcaaatgcgaatacacctggctataaagcacaagatgtaacatttgctgagcagatgaataaaagtagtgcgttatataaaaataatgcggctgatttaaagagcaatccagatttatatcaaacgaatgaaatgcacttaccgacagtaaatacgaaaaatacatatgcaaagattcaaacaaaatcaatgcaaacgaataaagacggaaatagtgtggatgtaacgacagaaatgctagatttaatgaaagcaaatcagttatacggtatttcaattaacgcaattaatacacaatatgcaattaaccaagcggcacgcggacgttaaaagtagaaggagagacaacggatgtttcaggcaattaatgcaagtggctcagggctaacgacagcgagaaagtggatggaagttacttctaacaatattgtaaatgcgaatacgacggcggctccgggggcagatttatatgagcgtcgtagtgtggtgctagaatcaaacaatagttttgcaagtatgttagatggggctcctactaatggagtaaaaataaaaagtattgaagcagacaaaacggaaaatttagtgtatgatccgacgcatccgcacgcaaatgaagaaggatatgtacgttatcccaatattgatgtaactgctgaaatgacgaatgtaatggttgctcaaaaaatgtatgaagcgaatacgagtgtattaaatgcaaataaaaaaatgcttgataaagatttagaaatcggccgaggataagggggaagataataatatgaaaatccaaccaatgttacatacacaaccatttggagcaattcagtcaattggtgcaccgaagacttctcaaacacctgtagttgaggggaaaaagtttattgatttattggaagatatgaatcaaacgcaaaacaatgcgcaaacagcagtatatgatttactaactaaaggggtaggagaaacacatgacgttttaattcagcaaaagaaagctgaatctcaaatgaaaacggctgctctcgtacgtgataatcttattgaaaattataagtcactaattaatatgcaaatttaggaaagtggacgggtgtgtttaaatggaaaagatgaaaaatgttatccaatcgttaaaaacatggcataagttagtaatcggtgctgcgcttttagcgattgtaacaggagcacttttatacttcaccttgccagataaatatgttgttgtatatcaaaatttaaatgatgcagataaacaagagattacagcagaattatcgaagttaggtgtcgattatcaattagcggccgatggttcgattcgtgtgcaaaagaatgatgctccatgggttcgaaaagaaatgaatgggatgggcttaccgtttaattcgaaaagcggtgaagaaattttattagaaagctcgctcggttcaagtgagcaagataaaaaaatgaagcaaattgtcggtacgaagaagcaattggagcaagatattgtaagaaactttgcgacagttgaaacggcaaatgttcaaattacattgcctgaaaaagagacaatttttgatgaagaaaaagcaaaaggaacagcggcgattacggttggagtgaagcgtggacaattgttaacagctgatcaagttgcaggtatacagcaaatgattagtgcagcggttcctggtgtgaaagcagaagaagtaagtgttattgatagtaaaaaaggtgttatctcaaaaggagcagatgaagcacattctagtagttcctcttcttatgagaaagaagttgagatgcagcaccaacttgaaggtaaattaaagcaagacattgatgcaacattaatgacgatgtttaaaccgaatgaatataaagtgaatacgaaagtatctgtaaactacgatgaagttacacgtcagtcagagaagtatggtgataaaggtgtacttcgtagtaaacaagagcaagaggaaagctctactgcgcaagaaggggcagatacgaagcaaggtgctggtattacagcgaacggtgaagtgccaaactacggtacgaacaataatcaaaatggtaaagttgtctatgataataaaaatggtaacaaaatcgaaaactatgaaatagataaaacagttgaaacaattaagaaacacccagaattaacgaaaacaaatgttgttgtatgggtagataatgatacgctagtaaaacgtaaaattgatatgacaacttttaaagaagcaatcggaacagcggcaggacttcaagctgatccgaacggtaactttataaatggtcaagttaacgttgtaactgttcagttcgatcagccgaaagccgaaaaagagaaagagccagaaaaaagtggtatgaactggtggttattcggtggaattacagctggcttattagcgattggtggcctagtatggttcttattagcaagacgtaagagaaagaaagaagaagaggaatatgaagaatacttagtagaagaggaaattgctgcaagtaatgaaagtatcttggaaattcctgaagaaaaaatagtgccagagccaaaacctgaaccagaagaaccgaaagaaccaacgttagatgaacaagtgcaggatgctacgaaagaacatgtagaaggaactgcaaaagtaattaaaaaatggttaaacggacagtaagggaggaacaacgatgttagatgaaatctcctccaaagaaaaagctgccatccttattcgtacattagaagaaggggtggcagcaaaagtcattgaatatatgacagctgaggaaaaagaagtattacttcgtgaaatcgcaaagtttcgtgtatacaaaccagaaacgttagaaaatgtactaggagagttcttatatgaactaaatgtaaaagaattgaacttagtcactccagataaagaatacattcgtcgcatatttaaaaacatgccagaagacgaactggaaaaattattggaagatctttggtataacaaagataatccgtttgagttcttaaattcacttacagatttagagccacttcttacagtgcttaatgatgagtcaccacaaacaattgcaattatcgcttcttatattaaaccgcaacttgcgtctcaattaattgagagattgccagatcataagcgcgttgaaacggtaatgggtatagcgaaactagaacaagttgatggtgagttaattaatcaaattggtgagttgttaaaatcgaaattaaataatatggcatttagtgcaattaataaaactgatggcttgaaaacaatcgtaaatattttaaataatgtttcacgaggtgttgaaaaaacagtctttcaaaagctggatgaagtcgattatgagttatctgagaaaattaaagaaaatatgtttgtctttgaagacttacttggtcttgaagatcttgcgcttcgccgtgtattagaagaaattacagataacggtgttcttgcgaaagcacttaaaattgcaaaagaagaaattaaagagaaattatttacatgtatgtcttcaaaccgtaaagagatgattctagaagaattagatggcttaggaccgcttaagatgacggatgctgaaaaagcgcagcaaacgatcactggtacagtgaaaaagctagagaaagaaggaagaattatcgttcaaagaggtgaagaggatgtccttatttaaaaacagaattccgaagaattctgtttctttttctgaagaaacgtatgaattacaatttccaaaaccagcttcaattcaaatagaagaggaagaattacaagctgatcatgcagaacttcgcgcccagcaagaatcgttacatatggaaatgaatcagctaaggcaagagaagcaaatgctagaacgagagcggcagcagttattacaagataaagaacaatttcaaatgcatattcatgagcaactggaacagatggaagcagcgcgtgtgcaatttcaaaaagaacaacaagaaacagcgtatgaatggacagagttattatgggatcaatcttttcatctagcagaaaaaatcgtgaatcaagcggtagattcacgattgcttgatgtgttacctattttaactggcatcgtgcaaacattgccaacttcgtttgaaaaattaatcattacagtacatccagaaacgtttgaacgtattcaagaagagaaggaaaatacgaaagaatattggttactacaattagtagaatggaaatatgatttctccctgcagtttggtgaatttgttctggaagaagagaaagagttctttaaatttaaatttgcacctatatttgcgaaacttcgtcagaaatgggaagaagagaagttatttgaggagcaaaatgtatgagccgcctgttaatgaatgagaacgaaaaatggaataagttcattgaaacaccgctgtatacgaaagtaggcaaagttcatagtgtacaagaacagtttttcgtagcaaaagggccgaaagcgaagattggtgatgtttgcttcgttggagaacataacgtcttatgtgaagtgattgccattgaaaaggaaaataatatgctacttccatttgaacagacagaaaaagtatgttatggagattcagtgacattagtttcagaagatgttgttgtaccacgtggtaatcacttgctcggaaaagtgttaagtgcaaatggtgaagtgttaaatgaggaagctgaaaacattccattacagaaaataaaactagatgcaccacctatacatgcatttgaacgtgaagagattaccgatgtatttgaaacaggaataaaatcaattgattctatgctaacaattggtatcggtcaaaagattggtatttttgctgggtcaggtgttggtaaatcaactttacttggaatgatagcaaaaaatgcaaaagctgatataaacgttattagtttagtaggggaacgtggccgggaagtaaaagactttattcgaaaagagttaggcgaggaaggtatgcgaaaaagcgtcgttgttgtagcgacgtcagatgaaagtcatcttatgcaacttcgtgcagcgaaactcgcaacgtctattgctgaatacttccgtgatcaaggtaataacgtattacttatgatggactctgttactcgttttgccgatgcacgaagaagtgttgatattgctgttaaagagttaccgattggtggtaaaacactgttaatggaaagttatatgaagaagttgttagagcggtccggaaaaacacaaaagggatctataacaggtatttatacggtgcttgttgatggggatgatttaaatggtcctgtaccagatttagcacgtggtattttagatggacatatcgtattaaagcgtgagcttgcaacgcttagtcattaccctgcaatttcagtattagattcagtaagtaggattatggaagaaattgtttcgccacatcattggcagcttgcaaatgaaatgagaaagattttatcaatttataaagaaaatgaattgtattttaagctaggaacgattcaagaaaatgaagaaaatgcttatatttttgaatgtaaaaataaagtagaaggcataaatacatttttaaagcaaggtcgatcggatagtttccaatttgatgatatcgttgaagcgatacagcatatagtataaggcctctgcataagaggtcttatttttttgttttttaatatttcacagatttttttggaaaaaaactatataatagaaaaagagaacgttataatagaaaggggttatgaaaacaggtggataaacagcagtacgacacaataaaattgcaaataaatcaagaaaaagaacatattttaaaagaagtgtatgaattaacagctgaaaaaagaaaaatagaacaaaaaaaagaatatgatttatatgttgtgaaatcgcgtagtaaagtcgtacaaactgggcaacgtattatggctggtatgctttcttcacatacgttttcacctgaaagaatagaagaatggaatcggaaaattaaaaaaacggaaggttttattcaaaaaaatgaaagtcttttagagcaagtaaaagaaaaagaacgtgtcattgatgagatgtatcaagaagattgcaaaaagcttgcgaaagcacaagaaaagctggaagaaaaaatgcttctggatttgaaaatgtgtatgaatggatgaggtgaatgtagtgatacagtctgtattaccggtgcaacaaagtttacctccgcaaaaagaaaaagggctagaagtacaatcgaaaaatgaagattcttcatttgatcgtacgatgagaatggaaaataaaaagcagccgaaaacggagaaaacgaaacgagaagaagcaccaaaagaagagaaaaaagaatataacctttctaaaccatcggtaacgaaagaagaaccaattgtaaagaaagaagaaaaaaaagagacagaacagttgttattagctgtatctgagcaaatggttgcaattgagcaattacatgtgcagccggaattgttatatcaatacatacaaaaaatacaagagctatataaagaatatggcaatattaaacttaatgaattacctgcagctgaattacaacaattacaagaacttctttcaaatatgaatatcaaaaatgctatatgtttagaagatacaatgcaaatggtattagacaaaatgaagatgccagagcaaacgatgcaagcattgaaggttgtagaaacagaaacttgtaatattgcaaagaaacaagaagaatttaaagacgtagatcttccgaaagctgagaacgatggtgcaaaggtagagttgccagaaggtgatgcattaaacgattcgagctctgcaggtgcagagttattaaataaaacgacgagtaccgaacaaatagggaaatcaaatagtggtgctgagaaagtttcattgcctgacttaggaaagaaaatggaagcgcaagtagaagccttgcaaaaatttgtagtgaaacaagaacgtgttttatttcagttaaatccagaaaaatttggtacgttaactgtgtttatgaaaaagcatggagaccaaattgatgttcacgtagaaatggaaaaacacgatgcgaaaaaacgtgttgaagtcatttttgatgaattgaggctaaagttaaaagaaaaagaaattaacattcaaattagctattctgataaagatgaaaaccgtaaagaacagcgagaacaagaacaaaggcaaaagcagaaattagcaagtacgcaacatgagaaacaacaatcaaaagaatttgcgggattattggaggaataaagtgtgccaacagttggattaaatacaacgagtacaaatcatattccgttacaagtaggggcgcaagcaaaaaatgcatctgttaatggtgtgcaatcgccagttcaacaaacaaacggagtatcagcaagtaatcaaaaaacacccggtattatggataaagatgatttcctgaaactttttttagcaagctttcaacatcaagacccgtttaatgcgatggatatgaaccaaatgatgaatcaaacggctcaactatcgcttatggagcaagtacaaaatatgacaaaagcagtagataaactacaatcaacgatgtatacgacagctcttgatggagggatgaaatttttaggaaagtatgttagaggtataaacaataagggagagcaagtgactggtcaagtggaaactgttcgacttgccgaaaataacgatgtacaacttattgttgataatcaagttgtctcacttcgttttgtagaaagggtttcagataaaccgatagcagaaacaaatccagaagatgagaagaaagatgatatagaaaaaaatgaagaggttaagcaaaattaataaaaattaataaaaattaataaaaggagtgtatataggttatgattaaagcgttatatacaagtattacagggatgaatgcggcacaaaatgcattaagtgttacttcaaataatattgcaaatgcacaaacagttggatataaaaagcaaaaagctatttttgatgatctgctatataataatacggttggttcacgtggggatggtgcttatgctggcacgaatccaaagagtattggtaacggtgtaaagtttagtgggacatcaacagattttagtgatggttctcttactttaactagtgataagatggagacagccatagagggaaatggtttatttttagttggcgatcgtaatagtggaaatgtagagtatacgagaaaagggtctttcggtgtatcgaaagataactatgttacaaatacaagtggacagtatgtgctaggttatggtgtgaaaacaggaacacaagaaatagatttttcttcacgaccaagtccaattcatattccaatgggatcagctgttggtgggattcaaacagataaagcaacaataggtggaaaccttcctagaaatcaaaatgcattatctcacgaattcacagtttttgatgaggaaggaaactcgttaacgttacgtgtaaatattaaacaaaagactacaaaagagactgtagatggaaaagaagttgaaaagcctgtgccaggtgaatatacatatacagtttctgtaagaaatgattctaaaaacgaaaaagagtttaagcctgttgaaggcatgacgggcgaaaaaaatcttaaatttgatacattaggaaatctaaaagaaacagatgaatctgtacaaaaaaatccagtaactggtgaaattactaaaggtggaacagttaaaattccttttggtaagggactgacactggacttaagtggtttaacaaattatccgacagggaaaactatttctacaacagaagtaacggggcgtccagctgcaattgcaaatgactattcaatttctgacggtggtttcgttatgatgacatattcggatggtagtatgaaggttgtaggacaactagctgtagctacattccctaattcaggtggattaatgaaaactgggaatggcaattacattgccacaccatcagcagggattccagggataggtgttgccggtgagaatggtgcaggtaatgtaagggggtcagcaaaagaaagttcaaacgtagatttatctgcagaattcgttgacttaatgctatatcaacgtggattccaaggaaatgcgaaagtaattaaagtttcagatgaagtattaaatgaagttgtaaatttaattcgataatatattataaagaaagattgtaatgtagtagaaagggtttttattcgtatgacaagacaagaacgaattttacaattgccatttttcgagaataaacgtgaacttgctgaacaagtactaaaaatggaacgagaagagcatatatatttaccagatcaatttgaaattaagcaagtgcccccgtattcatttgctgaaaagaaagcgattattggtcgtattcatgagttttatttcgtcagtgttggcagtgatggcgcatggaagtatcaactgtttaaggacgagatgaagtgccgtgagttttttattacattatcaggcattacggatcagcaaattgcgttttggttcaacaatatcgagttgcttaaaggcgcttaaaagtgtttttaggcttaggtggctcggagctgtaagaagagaactataaaaatgtactggagtggttgaacaataatctctttatagcaagtcagtactttttatagtctgtgagttgtgacaatagggcaatgaaatgagagtatgctagtttcatttcatatgtttgtgatgatagatttttataaaaggagaggtgaggaggatggcgcaaaataagtatcgcgttacattcatttcgccgagtgaggttgagcagcggactgtaatggcggcgaatagtttgccagatttaattcgtaaagtagagagtattattgcagatccaaacggttattttgtaaatgataaaaaaaataattgttattttaaagtgattaaagaaaatgttacgtttattcaatatgagttactattttcggataaggaaattcatattgaaaaattaaaacatatagcaccggtggtattcaaacgattattcgaaaaaataaatgaaccagaactatatgcactcgcactacttgatgttgatatagcaacgaaagaatatgtgctagcagaaatgaattctgagctgagaataagagtagagacggagctttcgaaaaaatgggaagcaatgccgacagaaattgtaggggcgcaagaagtgttattagaagcacttgcttcgtttatacaagattaattgttttttaataaaatgaattgatcgactatctatattttttatataggtagttgactttttctcttttataaagcttaataattagatatacggaattaatggaaggggagcgacacctttatgtcacaagcacaaagtattttattagaaagcggaacaaatgaattagagattgttacgtacactgttggtgaaaacctatttagtattaatgtaatgaaagtacgtgaaatcattaatccattccctgttacaactgtgccagaatctcatcatgcagttgaaggtgttgttcaagtacgtggtgaaattttacctgttattaacttggcaatggctcttaatttaaagtcaacaaagccacttgatcaaacgaaatttatcatctcagaattaaaccaaatgaaagttattttccgcgttgatgaagtgcatcgtattcaacgtatttcgtgggaacaaattgatgaaccagcttcattatctatgggactagaagaaacgacatctggtattgtaaaactagatggcaaaatcatcttactattagattatgaaaaaattgtatgtgaaattagcggtactggttatgacaataaatcaattgcagggttagaacaaaaaacagatcgagctgaaaaagtaatttatattgcagaagattcagcgatgctacgccaaatattagaagaaacattatcatcagctggatatacgaaaatgaacttcttcagcaatggtgcagaagcgttagcgcaaattgaaaaattagcgaaagagcaaggagagaaaatgtttgaacatattcacttgctaattacggatattgaaatgccgaaaatggatggacatcatttaacgaaagtggttaaggatagtgaagtaatgaatcgtttaccagtcattattttctcttcattaattacaaatgaattattccataaaggtgaagctgtaggagcaaatgctcaagtaagtaagccagatattcaagagctaattggtttagttgataagttagtgttgtaagaaaagcacttttttagctggaatagaggaactagctatgtgtggcagcggtcagtgcctaatagagacccatgcgatgtaagaccagagatatggagtgttttttaggtaaatgggacgagatagccgccgagatagctttagaagaagcgagacttcgattgaggatttgaagactgggtttataactctattctgttagagagaggaaggaattagccatgtgtagcattggctaattcctttttagtattctatactttaagctggcagaaaaatgaaaggtttctgaggtgtttggcgctgtatgtatgaaaaatcttcaaatgaagatttttgatttgaaaatataagcaaacgtattttgagggttattttagtaacatttcgtggtaacgcaaattttttcggtgaaaaaacatccaaaataccatataatataattaaatgtaattaatatgcaattttacatattaattaaaaaacattttccaaatttttatactttctatacatttttgtatgtttattatttgacagataatttcgaactgttataatatggatatgtaaaaattgctattttcttaaaagacatgggagtcagatgagaattgtgaaaggatgagggggagtggcacaaattatgtatcaccacacagcaattaatgtattaggtcttttacaaaacatgtcaaataataaaatgaacgatatgcaactagaggcggaattaaaaaaaatagaaaaagaattccaagtaaagtatgaagaattagttgatttacataatagaatggtattattccaaatagatatagaaaaaaatggcgggatgcgagcatatgaaaaatcagcaattacatggctgaagtctgaactagtgctactgtatgaagtgtatcaattttgtcaacgtcacggtttaaacattttaaatatttcaaaatacgtaagtaaaaatgaactaaatctttttccaaaaacagaaagtcaattgcaaaatacgtattataaattaaaaaaacgtgaaataccgtttgaaaatattgaaaaacaaaaaccaggacgaaagcgaaaatatataccagtaaaagagacaatcgttgcaagaaaacaagaaaacgagtacgaattaaaagaagaaatccagcataaagaggatgaaaaaaatcttgtaacagttatatctggtatcgttgataactttgaaacaattaatcaatgtagtgaaaggaaagaagacgaactacatcagtttatggaaggtatttataagctttctagcatggcagcaggacgttctagagaagcaaagaatacacgtagtctagaaggtgaattgcagtcgttacaactagaaaatgaaaggctaaaacgagagaaagaagagcttgtacaagatattaaaggcatgacgcagcttttaattcatttcattacaagttctgatatcgatcaaattcgtaaattaccaactttcgtacaagattgtaaaatggaattacataaactagggctatataatgcacaagacggtaaaatgaaaattatggttgatcgtagtggacaggttatgactgtcacgcagtaataaaatttgggtacaaaataaaagggaggtacatagtttatatgtatttcccttttgttttgtatggaatcgttccaaagatggaagatgaatgtttatgattgtagtagtctagagaccatttgcggaatttggttcgcttgtgaaaccatactaagtgcaacttcagtcaataatttgaactttaaaaaatcactcatctcctgcgccatgtctgcatcttcaacttgagatgcagcatctgttaacgccatactttgactatttaaattttcaatattaaattgtaaacgatttatcatagcaccaaggtcggcacgatgaagtgacacactttgcaaagcatcttcaattttaagaatcgccgctcttgcttcttgttctgttgaaatcttaatgtcatgttgtgtaggggaagggggaatatgtttcatcatatttattgtatgaccgatatcgtctaatgtaatagggcggttttgaccgtcaaatacagataaatcattaaactcagtcgtctcgccaatatagccaatttgttctgttaaagactgaaactctttattcagcgagtcacgatttttatttgaatttgtaccattcgcagattgaacagctaaatcacgcatacgctgcaaaatatttgacacagtttgaagagcagcttccgccgtgcgaagcatcgatatcgcatcctcattattacgaatcgccacgcgcataccacttgctctcgcgtgcatacgagtcacaatcgcaatattagcgggattatccgaagcgttgttcaacttcttaccagtcgccaaatgctccattgcaacattcatacgtttctcattctcatacaacgactgcctagcattcatacttaaaacattcgtaccaatacgcataatagacactccttatagattgatagagtcggtatcttttgatctaataaacagttatggaaggatagaggggcttatgcttatttactgtttgtgttttaacataagagggaatcaagataaaagcatcacggatactctcttccacataaaaaagaaagttttataaataatctatctatatagaaaaaataaacctctctgcaagcagagaggtttattcaggaaactaactcaaatggcttattgtaataatttagaaaccatttgtggtgtttggttagcttgagaaagcatgctgatgcctgcttcgtttaaaattttgaactttgtcatgttagacatttcttttgccatatcagcatcttcaatttgagaagcagaagctgccatattagtagcttggctcgttacgttgtttaagttatggtctaaacggtttaattgagaaccgaaagttgctctagcgtcagcaatttcttgaatagcagtgtccagagccgtgatttcagttgctgcagttgtagcatctaatttctttgatccatcagttgaaactgctaaagtaccagttgttttaccttttgtatcgatagctgtgattttcattgtatcatttgaagcgtcagaaagctgaattgtgatatctttcccaccaccacttaaaaatgcgttaccgttgaaatttgttttgtcagcaatatgatcaatttcttgtgctaatgcttgatactctttgtccatagatgcgatatctttatcgttgttagtaccgcttgatgcttgtgttgcaagatcacgcatacgaagtaagatgtttgaaacagaacctaatgcagcgtcaccagtacgtaaagcagacatagcgtcttgtgtgttacgtgctccaacgtttaatccgccttctttcgcacgcatacgagtagcaatagctaagccagccgcatcgtcagctgcactgttaattgatttaccgctagataaacggttcatagatgtattcattttgtcttggttttgtcgcatgtactcttgtgtacgcatgctgttaatatttgtattaattctcatgttaagaacccccattaatttttaattatttaaaagaaaactctttatatactacagagagtatatgttcaaatggattattgtaataatttagaaaccatttgtggagtttggttagcttgagaaagcatgctgatgcctgcttcgtttaaaattttgaactttttacaggtctctcatgaaagtaaaaaaattaagtttaaacatactatacgaggaggggatatgttgaaaaggatactgttagtttcaacaagtgctcatgatatgaatggacacccgactggtttgtggctggaagagctcgcagctccttatcatgtatttaaaaaggctaagtttgatgttgatattgtgtcaataaaaggtgggagagtacctatagatagagtgtctattccgaatggtatacctcgcgaattcaagcatgtagcttctttattgcaaaatacgaggccgatttcaaatgttcatttttcggattatgatgcggttttatttggtggtgggcacggggcgattgtagattttccaggtaatccatatgtagcaaatttgattgagaatatgtataacaataaccggattgtagcggctgtttgtcacggagtaagctctttagtcggtgtgaaaaataaggatggctcgttttttgttgcgggtaagcgtataacaggttatacaaacgatgaagaaagagctgtacatttagaaaagcgcgttccgtttttgttagaaagtaagttgaaagaagaaggagctttgttttatgtagcccccaattttacgccgcatgtagtagtagatggtcatttaattacaggacaaaatccacagtctagcgtggaaataggtaaggctataaaaagggctgtaaataaattatcgtcattttaatttctgctcatttcttcttattaacgggaatgtcttcttttcaaaaaaagatggagcaatgaatatgcactttatatagaagaaaccgactttcttatagaaggtcggttatttttctatcttgcaaattacgaaaaaaaggagcaaaataaaaaaggtcctagtctatacatgggcaaatgaaaattttcatacagaagcatttgaagtgagtgaacttaaagtgtgtaaaatataatgataaacataaaagatgatgaatgagaaaacgggtgatgaagttgaatagagcaatcggtgttatcgattcaggagttggcggtttaacagtagcgaaggaattaattcgtcagttgccgaaagagcgtatcatatatttaggagatacagcacgttgtccttatggtccacgttctcgagaagaagtacgtcgatttacgtgggaaatgacggagcatttactaaatttaaatattaaaatgttagttattgcgtgtaatacagcaactgcagttgtattagaagagatgcaaaaacaattaccaattccagtagtaggagttattcacccaggatcacgtacagctttaaaagtgacaaacacgtatcacgttgggattattggaacgattggaacggtgaaaagtggtgcatacgaagaggcgttaaagtctattaataaccgtgttatggtagaaagtttagcttgtccacctttcgttgaacttgtagagagtgggaatttcgaaagtgaaatggcgtatgaagttgtaagagaaacgctgcaaccactgaaaagtaccgatattgatacacttatattagggtgtacacattatccgattttaggacctgttattaaaaaagtaatgggagataaagtgcaactaattagttctggtgatgaaacagcacgtgaagtaagtacaatcttatatcatagtaaaatgttgaatgaaggagaagaacaaagcgatcatctcttcttaacaacaggaaaaataggcttgtttaaagaaattgcatcaaaatggttcggtcaaccgattgaaaatgtgaagcatattcatttagaaaaagaataatagtagaatttatataagtgagctcctgagaaatcaggagcttttgttttatcttgctatttgctgggtagtaagacccctgctgattaaagtttcaatttataagaggcacagcttgttctaaaacgtgaaacagctcgtatacataatagtacaaacttagattttaggggggaatggcatgcctaaatccacttttaaatgggttgttggtgctactgtgagcgctgttttactaacagggtgtggctttataaatcaagagaaagcaactgaacaaattgatccaccaaaacaagttacgtatacagagggtgggaagaaagaagtagctaaaaaagataagcaagggcaaatggtaaatagagaactataccttgttgataaaaatggttatgttgtaccacaaacgttagctatacctactccgaaagcaaatgagactgtgaagcaaacgttagaataccttgtgaaagatggaccggtaacgaatttattaccaaatgggtttcgtgcagtcattccggcgaatacaacgatgaccttagatttgaaaaaggacggaacggcagttattgatttctctaaagaaatgaaaaactatgcgaaagaagaagagcgtcaaattgttgaatctatagcttggacgttgacgcaatttacagagataaaacaagtgcagttccaaataaatggtgagaaattggcaaaaatgccggttggtggtacaccgcttggtgaaggagtgagccgtgcaaatggtattaacttcgatgatgaacaagtaacagatgtaacaaatacaaaaccagtcacactgtattttatggcgcaaaataataataaacagcaatactacgtaccagtcacacgccgcgttgcggaaggtaaagaaaatgactatgcagcaattatagatgagcttgtaaaaggtccgatccatcaatcgctcctaaatgattttaatccaggcgttaagcttattacgaatccgaaattacaagacggaaaccttacattaaactttaatgaaaatatatttgtaaacccagataaaaatatgatttcaaattacgtattgaagtcgttagttttatctttaacagaaaagaaaggtgtgaaaaatatttctattgaagtaaatggaaaagcaaatcttatagatgaaaagggcggaaagttaataaaacctgtagatcgtccagaaaacgtgaatacaggtagtttttaatcttgaataatttgatatacttaagtaagaaaggagaattgctttttgggttctccttcttttattgtatacatatcatacatttaaatttggctatactaacgagtagtaattaagaggaggttatttttatgcgagtagatggtagagagaaaacagaattacgccatatacatattcatacgaattatttaaaacatccagagggatctgtattaattgaagttggggatacaaaggtgatttgctcagcaacaattgaagagcgtgtaccgccatttatgcgtggagaaggaaaaggatgggtaacagctgaatacgcgatgattccacgtgcgacagaacaacgtacaattagggagtcaagtaaagggaaagtaacaggacgtacaatggaaatccagcgcttaattggacgagcattacgtgcggtagttgacttagaagcgcttggtgagagaacggtttggattgattgtgatgttattcaagcggatggtggaacgagaacagcttctattacaggtgcatatgtagccatggtattagcgtttgagaagttattacaagtagaaaaagtatctaaaattccagtaaaagattatttagcagcaacgtcagtagggattgttgaagaacaaggtgttgttttagatttaaactatgcagaagattctaaagcagacgttgatatgaacgtgattatgactggaaaaggccagtttgttgaagtgcaaggaactggagaagaagcgacgtttagtagagcgcagttaaatgaactacttgatgcagcagaacaaggcattttccaactgattgatatgcaaaaagaagcgttaggtgacatcgtatctcatatagagtagaggtggaaaaaatgaaacaagttgttgtagcgacaaaaaatatggggaaagtacgtgaatttgctgagttatttgagcgatttgatttagaagtgaaatcattacacgattttcctcatattgaagaagtcgaagaaactggtgaaacatttgaagaaaatgcgatcttaaaagcggatagtttgagtagacagttgaatgcaattgtaattgcggatgattcaggtcttattgtagatgcgttaaacgggaaaccaggcgtgtattcagctcgttttgctggagagccgaaagatgatcaagcgaatattgataaagtgttacaagaattaaatgaagtagcgtttgaaaagcgtaaagctcgtttctattgtgcattagcagttgctttccctgaaggtgataaaaagcctgtcattgtaaacgggacatgtgaaggatttattttagaacaacgccgcggggaaaacggctttggatatgatccgattttttatgtggaagaatataaaaaagcgatggcggaactaagttcagatgagaaaaatgctattagccatcgtggccgtgctcttcgtaaattagaagaaaaaatcccggaatggtttttaggagaataagggagagagaatgatgaaagctttaatcgtaagtgatagtcatagctctgtgaaggaattacagcagttgaaagagaaatatgaagggaaagtagatatcatgattcattgcggtgattcagagctaacgcctgctcatgaagaactgcaaggtttccgtgttgtaaaaggaaactgtgattatgctaactttcaagatgaaattgtaactgatgtagatggaattcgcttcttagttgtgcatggacatcgccataatgtgaaaatgacattacaaacgctagcgtaccatgctgaagaagtgggagcgcaagttgcatgctttggacattctcacgtattaggtgctgaattaatcgagggcgttttatttattaatccaggcagtattttattaccacgtcagcgtgtagaaaagacatttgctttattagaaatggatggaaatcaaatggaagttcgttttgaaacgttagacggacaactagttgaacaagcagtttttaaaagaggataagaaaatttatcctcttttaaaaaaggtgttgactttatgtgtggttatacatataataaatattgtcgatagggaaacggcgctaacgaagaaaagaaaataacatatgcgggtgtagtttagtggtaaaacaagagccttccaagctctggtcgagagttcgattctcttcacccgctccatgtcccagtagctcagccggatagagcatacgccttctaagcgtacggtcgggagttcgaatctctcctgggacgctaaaaaaaccttgttatcttttgataacaaggttttttgtttgtctaaaatttgatgtttgggttataggtgtagttcattcttgatatttgcgacctttcctttgatattaagtagttgcatatgtacttctttttcttaaataaaaagagcgccatttatgcgccctattcctcttatttaatttaaagaatcaataggtttatgatggaactcaaatccatatccagattctcttaattgtttacttacaatattataaaactctttaccattctagtacaattcagcagcagttatcggaacttattcccggtagtgtgttacaattaatagaagcggaaaacgagaatctccaattgactggacctgtgattggttagatggtttaagaaggtcgtataaaaaagggagatggcgcaaagatggcgagatcaaatgagaatgatttaacggagaaattggcggaaggtcaccggaaatatggtgatggcaattttacagtacagaacatcggtgatgaaactaacccgaattggactgtcgtaaaaaatgtgaggaaaggatcggcaggcattcgcgaaggagaagatatattaagactgcgatcaaaatatataaaatagtacggaaatgggcggagcgggagttcgaatctctcctggggcgccaagaaaaccttgttatcttttgataacaaggttttttgtttgttttaaattagttgttaataaacttgtcaaagacaaaaccataatctttcacattatattgtttcttcgtatcaacgagccagttaaaggcaatctcgttcatctctttaaattgctctgctaagtttacttgtgcgtttgaaatacggctgaaagcgttagatgccatatctaaacttttgtgtgcatattgtaatgtaatatcgttgtcgtatgaaatttcttcaattttaagtaaagctttatataaatcttttaattcttcaatatgttttttatggacatcaattgaatagtgttcatcgcccatttggaacttaatttctacatctaaatcaatcgttcccgcagtttcaagcgctacgtttttaatttgatatttactatagctaaagcggcgtagtgtacgttttttacttgttgcgcttgtaccgtctaagtgaattaaccctttgtttgtgaagcaatattcatctgatttcgatttaattagaaagtaaattttctccccatcttcatgcattacataatcatcggcatcgaccttatcatagtctttaggtgtaataacagaacctacatcgcttagtcctaatacatctgcggccatttttttaaacatatataatcccccttgtaaattaaagtcttaattgtacaaaaatatattaacatgatcttcatcctttgttttcttgtaatacgaaaatatctgaaggtaagttaagaaaagtaatgaataattattttgatcctaaattatttagtaaatctattagtttaagagtggattctccgaaaaataaccaagagaaaaaagttaattttgcaagtgattataaataaattccgtgaaagcacctcaagcgatatgaggtgtttttcaatctctttttgaaatcttacaattctgtaaggtaactgtaaggtagttcgatggtaagaaattgctaatcttttataatgaagataacaacgataaaacgaggaggcagaaatgatgaaaggattagttgtaacgggcttgacggttgcttttggatttgtagcgtatgagaaattaacgtatgtagttgatgttgtgaaacatttgattgcttagagaaaacagccatgagagggaaagggaatgagtgaatgaatggaatggttatttggaattataggtacttgtagtgtagtgttattgttctttgtcccaagtggtatacttagttcgacaacaagtttgttcttcttaagtttgtttgcttgtacgatgcttattattatgtttttaatgaagcgaagtaaaccaatcttctattttagcatgattgttatggcaattattgttctccaaattattacccttgtaatataccccacaattataaaagctttccattaatgatgaatcctctgcgtttgttgctggggatttttacttgtacaattttaatttttagtagagatttatttgtattggaatgtaaaaattaaatatttttatatttcaaacaaataatttggggatgttgtgttctcattacgcatttgatatatttactttgaacataattaaaatcaagaaaaagaggcggacgtatggataaaaaagaaaatacggtcgtattgtttccgcagctatcagagcgctatattgatgaaggttttttagcgttgaaagagcggaagttcgaagatgcattgcgctgctttgaaatattacgtcagtataatgcggaaacggaacaaacggaattagcttcagttatttgtttactcgaattaaaacgtatggaagaagcgaaagacaaatgtgaacagttgcttaaaacaggagttgtcttatttggtgatattcttgaaacgtacgtgactattttagttcaaacaaatgattatgaaggtgttattgaaactgttgaaaaggttttacaaacgaaagatataatgcctgatcaaaaggaaaaattagcgcagcttgctttatttgcagaaggtatgctaaatgagggagacgcatcgctagtggattcaaattttgagttgaatgagtttactaatgaaatttttggagaaaactttggacagaagctaagagcgattcagcgactttcattaaaagacttagatcttgcattacctgttttaaagaaatttttaatagatgaagagcaacacccctatttgaaaacttctattttgtataaaatgatagaaagtcaggtagaagaggaaatagaggtggaaaagtttgggaatgcaattaaggtaattccggcatttacaggtcataatgaggagcaatccaataacattatacataaattatcaagtcgattagagcaaaaatatcccgatatatttgaagcgatggttacatattggaaagaattgcaaattagcattttcccattcgctctattaatggataaagaagagatttggtcagctgttttagagagaattggaagaaagcgtttcggattggctattgatgaagaagagcttatggcagcatacaatatcgaattggaagagtttcatattgcctatcaatggttattacgtgttgaaagagaaggatatttgcccgtataattatgaaaaagaatcgttcagttcttgaaacgagcatattctatgttataatgtaagggttgcaaaaggcagaaaactgcctgtttgtaagagaagagaagtgtaattctcttacttaatatgtttcatattattctcgaacaaaatataccgtagttgtcttctgggcaattagtagattggaacattatatctgaaagcttttgctagaggattatttgtgtatttgttatttcaaaaaagagataatgaagatcttaatctatagaggtatgtgcatacattattatagttggagggaaagaataaatgtctacaaaatgggaaaaattagaaggtaacgttggcgttttaacaatcgaagttgatgctaaagaagtaaacaactctatcgacgctgcgttcaaaaaagtagtaaaaacaattaacgtaccaggtttccgtaaaggaaaaatgcctcgtccattattcgaacaacgctttggtattgaatctttataccaagatgctttagatatcattttaccaaaagcatacggtgaagcgattgaagaagctggtatcttcccagttgatcatcctgaaatcgacatcgagaagttcgaaaaaaatgctaaccttatcttcactgcaaaagttacagtgaaacctgaagttaaattaggtgagtacaaaggtttggcagtagaaaaagttgaaacaactgtaactgacgaagatgtagagaacgaattaaaatctttacaagagcgtcaagctgaactagttgttaaagaagaaggaactgttgaaaacggtgatacagctgtaatcgacttcgaaggtttcgttgatggcgaagcatttgaaggcggaaaaggcgaaaactactctctagcaatcggttctggtacattcatcccaggtttcgaagagcaagtaatcggtcttaaatctggtgagtctaaagacgttgaagtatcattcccagaagagtaccatgctgctgaattagctggcaaaccagcaacattcaaagtaacaattcacgaaatcaaaacaaaagaacttcctgagttaaacgacgagttcgctaaagaagcagacgaagcggttgcaactcttgatgaattaaaagcaaaacttcgcacaaacttagaagaaggcaaaaagcacgaagctgagcacaaagtacgtgacgaagtagtagaattagctgctgctaacgctgaaatcgaaattccagaagctatgatcaacactgagttagatcgtatggttcgtgaattcgagcaacgtttaagccaacaaggtatgaaccttgagctttactaccaattcacaggtactgatgctgacaaattaaaagagcaaatgaaagaagatgcacaaaaacgtgtaagaatcaatcttgttcttgaagctatcattgaagctgaaaacatcgaagttactgaagaagaagtaactgcagaagttgaaaaaatggctgaaatgtacggtatgccagtagacgctatcaagcaagctcttggaagcgtagacgctttagctgaagatcttaaagtgcgtaaagctgtagacttcttagtagaaaacgctgcataataaaataacaaggcacgattaaaatcgtgccttgttttataaatatagaaatatatttataaaacttttcgatggagaaggaaaagttcctttacaagtcgaatatacatatttcaaaagttttaaaaattttttatttgtacataactagtcatattatttgtatttctcgccacgtagtgacataatatgtatttacatacgatacatttatcgtgtacatacgaaggcaagaggttagcactttgtaaggggtgtgaaaatatgtttaaatttaatgatgaaaaagggcaattaaaatgttctttctgtggtaaaacacaaacgcaagttcgaaagttagtggcaggtccaggtgtttacatttgtgacgagtgtatcgaactttgtactgaaattgtacaagaggagcttgcgaaggacgaagaagtagaattcaaagatgtaccgaaaccggtagaaattcgtgaaatcttagatgagtatgtcatcgggcaagatagcgcgaaaaaagcactagcggtagcggtatataaccattacaaacgcattaattctaacagcaaaattgatgatgtagaattagcgaagagtaatatcgcacttatcgggccaacaggtagtggtaaaacattacttgcacaaacgttagcgcgtattctaaatgttccatttgcaatcgcggacgcaacatctttaacagaagctggatatgttggagaagatgtagaaaatatcttactaaaattaattcaagcagctgattatgatgtagagaaagcggaaaaaggaatcatttatattgatgagattgataaagtggcacgtaagtccgaaaatccatcaattacacgtgatgtatctggtgaaggtgtgcagcaagcacttctgaaaattttagaaggtactgtagcaagcgttccacctcaaggtggtcgtaagcatccgcaccaagagtttattcaaattgatacaacgaacatcttattcatttgtggtggagcgtttgatggcattgagccgattattaaacgtcgccttggtgaaaaagtaattggatttggttctgagaagaaaaatgctgatgtaaatgagaagcatgttttatctcacgtattaccagaggatcttttaagatttggtttaattccagagtttatcggtcgtcttccagttattgcgaacctagagccacttgatgaagatgctcttgttgatattttaacgaaaccgaaaaatgcacttgttaagcaattccaaaaactattggagcttgacgatgttgagttagagtttgaagaaggtgcactaatcgaaattgcgaaaaaagcaattgaacgtaaaacgggtgctcgtggacttcgttctattattgaaggcttaatgcttgatgtaatgttcgaacttccatctcgtaaagatatcgagaagtgtattcttacaaaagaaacagtagctgataatgagccgccaaaattggtgttacaagacggtactgtacttgatacaaaaacatctgcataatgcgaaagggaaacagcaatttttataattgctgtttttctttatgtttagctacgttcctccgcggaaatactaagagataaaatattgcgggaggaaataaataatgagctggacaaatatatttttagttgttcaacttgtttttggtgtaattgtcggattgtatttctggcatttacttcgaaatcaacgaacacaaaaagtttcaattgatcgagaatcgaaaaaagaattagaacagcttcgtaaaatgcgtgagatttctttaacagagccgctagcagaaaaggtgcgtcctacaacctttttagatattgtagggcaagaggacgggattaagtcgttaaaagcggctctttgtggtccgaatccgcaacatgtaatcatatatggcccacccggtgttgggaaaacagcggcagcacgtcttgtattagaagaagcgaaacgaaatcctaaatctccatttcgtacgaatgcaacatttattgaacttgatgcgacaacagctcggtttgatgaacgtggtatcgcagaccctttaattggttcggtgcatgatccgatttatcaaggtgctggggcgatggggcaagcaggtattccacaaccgaaaaaaggtgctgtaacagatgcacatggtggtattttgtttattgatgagattggcgagctccatccgattcaaatgaacaaaatgttaaaggtgttagaagatcgaaaagtatttttagaaagtgcgtactatagtgaagaaaatacaatgatcccaacatatatacatgatattttccaaaaaggcttaccggcagattttcgcttagttggagcaacgacacgttcgccagaggaaattcctcctgctattcggtcacgttgcttagaagtatttttccgtgaattagatacggaagaaattcaaaaagtagcgaaaaatgccgcggaaaaagtagaaatgcaaataggtgaaaatggtattgagatgattgggatgtatgcaaggaatggacgagaagcgattaatctcgtgcaaatctctgcgggtatggcgataaatgaagaacgttctttcattaaggatgaagatatagagtgggttgttcactcaagtcagcttacaccgaaatatgaaaagcgcatttatccgattccaaggattggtcttgtaaatggtcttgctgtatacggaccaaatacaggtgcgttattagaaattgaagtaacagcaattccggcgaaagataaaggatcggtaaatgttaccggaattgtggaagaagaaagtattggtagtcaaacgaaatctattcgtcgtaaaagtatggcgaaaggctctgttgataatgtattaacagtacttcgttctttagatgtgttgccagaaggatacgatatacatattaattttccagggggtatcccaattgatggcccttctgcaggaatcgctatggcaacaggtgtatattctgcggtgcatcgcacgtatgtaaataatgaagtagcgatgacaggtgaaataagtatacacggagaagtaaagcctattggtggtgtatacgcaaaaataaaagctgcgaaaaaagcgggagctaagaaagtcattattcctgctgaaaatatgcaaccatttttgtatacgatcaagggaattgaaattattcctgtccgtaagttaaaagaagtatttgagttaacgtttatgcaaggaaatatgcatagagagctagatgtacatactaacgtagacgaaacagatgcacaatctatgtaaaaataaacaataataaaatttgccagacttcgtttaagtttgtatgcttaatcggagtctttttcttttcgtgaggtagaaaaacaagctatttacaattgcgcggaatctcagcaattgcatctaggtgtattgtaatataaaatagttgaacaggagtttaatttattatggaggtgctatgtctagtatgaatacgaacgaaagaatcgtgcccctcctaccattaagaggcgttctcgtatatccaacgatggttttgcatcttgatgtaggacgtgataaatcgatacaagcactagagcaggcggcaatggatgaaaatatcatctttttagcaatgcaaaaagaaatgaatatcgatgatccgaaagaagatgacatatatagtgtaggtacagtggcgaaagtgaagcaaatgttaaaattgccgaacggtacgcttcgtgtccttgtggaaggtttacatagagcagaagtaatagagtttatcgaagaagaaaatgtagtacaagtgtctattaaaacggtaactgaagaagtagaagatgatttagaagagaaagcttttatgcgtacgttactggagcatttcgaacaatatattaaagtttcgaaaaaagtttcaaatgaaacttttgcaacggtagctgatgtggaagaaccagggagattagctgatttaattgcttctcacttgccgattaaaacgaagcagaaacaagagattttagagattgtatctgtaaaagaacgattacaaacacttatttcaattattcaagatgaacaagagttacttagcctagaaaagaaaattgggcaaaaagtgaaacgttccatggagcgcacgcaaaaagaatatttcttacgtgagcaaatgaaggcgattcaaactgaacttggcgacaaagaaggcaagggcggagaagtagaagaacttcgtgagaaaattgaacagtcgggaatgccggaagaaacaatgaaggctgccctgaaagaattagatcgttatgaaaagttaccagcaagttctgcggagagtggtgttattcgcaattatattgattggttattagcgcttccgtggacagaggcaacagaagatataattgatcttgctcattcggaagagattttaaataatgatcattacggtcttgaaaaagtgaaagagcgtgtacttgaatatttagctgtacagaagttaacgaattcattaaaaggacctatcctttgtttagtaggccctcctggggtcggcaaaacttcgttagcgcgttcaattgcaacatcattgaatcgtaacttcgtccgtgtatctcttggtggtgtgcgtgatgaatctgaaattcgtggtcaccgtcgtacatatgttggagcaatgccaggacgcattattcaaggtatgaaaaaggcgaaaacagttaatccagtcttcttattagatgagattgataaaatgtctaacgatttccgtggagatccatcagcggcattacttgaagtattagatccagaacaaaaccataacttcagtgatcattacattgaagaaccatatgatctatcaaaagttatgtttgtagcaactgctaatacactttcaagtattccaggtccattacttgaccgtatggaaatcatttcgattgctggctatacagaacttgaaaaagtacacattgctcgtgagcatttattgccgaaacaattaaaagaacatggcttacgaaaaggtaatttacaagtgcgtgatgaagcgctgcttgagattattcgttattatacacgtgaggctggtgttcgtacgctagagcgccaaattgcaaaagtttgccgtaaagtagcgaagattatcgttacagcagaacgtaaacgtatcgttgtgacagagaaaaagattgttgatttacttggtaaacacatattccgttatgggcaagctgaaaaaacagaccaagttggtatggcaacaggtctagcttacacagcagcaggcggcgatacacttgccattgaagtttctgtagcgccaggaaaagggaaactaattttaacagggaaacttggggatgttatgaaagaatcagcacaagctgcgtttagttatatacgttctcgtgcagaagagcttcagatcgatccgaatttccatgagaaaaatgatattcatattcacgttccagaaggagcagttccaaaagacggaccgtcagcaggtattacgatggcaacggcacttatttctgcgctaacaggtattcctgtaagtaaagaagtgggtatgacaggtgaaattacacttcgtggtcgtgtattaccaattggtggtttaaaagaaaaaacattaagtgctcaccgcgcaggcttaacaaaaattattttgccagcagaaaacgagaaagatttagatgatattccagagagcgtaaaagaaaaccttacgtttgtgcttgcatctcatttagatgaagtattggagcacgcattagtaggagtgaaacaatgaaagtaacaaaagcagatattgtaattagtgctgttaaaccagaacaatatccagacagtgatttaccagaaattgcattagcaggtcgttcaaatgtggggaagtcttcctttattaataaaattttaaatcgtaaaaagttagtgcgtatttcttctaaaccaggaaaaacgcaaacgctgaactttttcttaatcaatgagatgatgcactttgttgacgttccaggttatggatatgcaaaagtatctaaatcagagcgcgctgcatgggggaaaatgattgaaacgtactttacaactcgtgagcaattagacgcagctgtattagtagttgatttacgtcaccaaccaacaagtgatgacgtgatgatgtatgatttcttaaagcattatgaaatcccaacaattattattgcgacgaaagccgataaaattccgaaagggaaatggcaaaagcatttaaaagttgtaaaagaaacgcttgctgttgaaattggcgatgaaattgttctattctcttctgaaacaggacttggaaaagaagaagcgtggaaagcaattcataaatttacaaaaacaaaaaacgcgtgacgaatgtcgcgcgtttttgttttgctaaattttttagcgtacgtttaatgtaacttcaatatttcctcgtgttgctttcgagtaaggacatacaccgtgagccgcttctacaagttcttgtgcttcgctatgtgaaacgccagccacatgtacatcaagtacagcagatagaccgaaaccaccatctgtatcttttccgatagaaacgtgagcagttacttctgtactttctactttcacacgttttgtacgaatgacaagttgtaatgcactatcgaaacaagctgcataaccagctgcaaatagttgttctggatttgttgcttctccgcctgcaccacctagtgctttcggcatttttacatcaagatttaatatgccatcatctgaaactactttcccatttcttccacctgttgctgttactgaagcagtatataatttatccatatttattccccttttccatcattaattgttttcattgtgtcaattagtttatttagttgaattaataaagagcgatattcttgctctgtaattcctaagtttgtagccatcgttgtcggtaatgaacaagccttttcctttaaatcgttgccttgttctgttaattcaatacaaacttttcgctcgtcttctttggaacgaacacgttttacaagttttaatgattccatgcgttttaacataggtgttaacgtaccagaatctaaaaatagacgttctccaatttcttttactgttagtccatcttgctcccatagtacgagtaaagtaatgtactggggatacgtaatacccatttcttctaaataaggtcgataaaaacgagtaacctctctagagcaggtgtaaatagaaaaacaaagttggttatctagatgcaaagagtcctctgtcataaataactcccttccaattaagttgtgcacaatttaattttgtaaaaccaatataacgaaaaagaaatacaatgtcaaatacattgtattgagaaagtctttgttgcattttggaacaatcatacatattttccttcatgatgaaagaagatagggaagatgatgttataatttatatggaatagtttccatcacttgattatgagggctttttttggtaacgtacaaatagagttattaatttataatcattataaagtagaagtttttttattagtgttactgaatctcctttattacatacggagaataattaaaaaataatcggttgttcacacgattgtcagattcataagaggaaagttgtattatgatagtagataaagtgataaaacgggtgaagggggacatgctgcgtgcatattcttgttgttagtgtaaattatcgaacagcccctgtagaatttcgtgagaaactcacatttcaggcagcagaactagagcgagcgatgactacattacaaaatcaaaagagcgtgttagagaatgtcattgtatcaacttgtaatcgcactgagatttatgctgttgtcgatcaattacacacgggacggtattatattaagaagtttttagctgattggtttcagcttgaaatagaagaagtcgcgccatatttaactatttttgaacaagatggtgcaatagatcatttattccgcgtaacgtgcggtttagattctatggtagtcggagaaacgcagattttaggtcaaataaaagatagctttttagaagcgcaacaagttaaagcaacaggcacaatttttaatgaattgtttaagcaagtcattacattagcaaaacgtgcccactcagaaacaacaatcggggaaagtgcgatgtctgttagttatgctgctgttgagcttggaaagaaaatatttggcgagttaacagattgtcatgtgcttattcttggtgctggtaaaatgggcgaacttgcactgcaaaacttatatggaagtggtgctcgtaaagtaacagttatgaataggacgctttcgaaagcagaagtaatggctgagaaatatatgggacatgcaaaatcgttaagcgaattacaatgtgcattattagaagcagatattttaattagttcaactggtgcatcggagtatgtcattacgaaagagatgatgacgaaggtagagaaaatgcgctctggtcgccctttgtttatggttgacattgcagtgccacgtgatattgatccagcgattgatgagctagaaggttctttcttgtatgatattgatgatttacaaggagtagtggaggcaaaccgtgctgagcgtttgaaagaagcagagaaaattcaatttatgattgaagaggaaattgttctatttaaaacgtggttaagtacacttggtgttgttccattaatatcagctcttcgtgataaggcacttgcaatccaaagtgaaacgatggtaagcctagagcgaaaaataccaaaccttagtgatcgtgagaaaaaagtcattagtaagcatacgaaaagtattattaatcaattattaaaagacccaattttagtagcgaaagaaatagctgctgaagagggagcgagcgaaaaattagcgttatttgcgaagattttcgatttagaaacggaagacgtagagagttgtgcggaagaagtagaacataaaaaagtgtggacaccatccgttccatctttataatttggaaggatgatcggatgagttttttaaataacagtattatttatcatattgcaattattttatatgcttgtagcattagtttatattttatagattatttccaaagtaaccgaaaggcgaaccgatttgctttttggttacttgcgattgtatgggtcctgcagtctatttttatgttgcttagggctacagattcagaaacgaatcctattttaactttattatcagggatttatttttatgtttggttattgattacgatgtcgttagtcattaatcgatttatgagaatcgactttttagtcttttttacaaatgttgttgcatttggcgtaagcgctttttctatttttacaccgctcggaaagatgtcgccagtacttgcggaacaattagtttcagaacttgtatacgtgcatgtcggtatggcaattatttcttacgcaacgtttactgtatcgttcattttttctattatgtacttattacaatatcgcctattaaaaaagaaaaaatggaatgcgagattaagaaggttagggaatttaccgaagctagaatctatgtcttacggattaaatttattttctgttccatttttcttactagcaattttattaggatgtatatggggatatacaaaattggataatttccattggtatgatacgaaagtaatcggatcttttgtcgttctatttgtgtattgcacaggtttatatttacgagcggcagatgtgttgcaaggtaagaaaattgtacagtggaatatcggatcgtttctcgtaatgctagtaaacatttttctattaagcagtttatccaatttccacttttggtatttataatgaggagagagaattatgcgcaaaattattgtaggatcacgaaagagtaaactagcattaacgcaaacaaactggtttattgatcagttaaaagccctaggtctaccatatgaatttgaagtgaaagaaattgtcacaaaaggtgatgttattttagatgttactctttcaaaagtaggcggcaaaggcttgtttgtaaaagagattgaacatgcgctacttacgaaagaaatcgatatggctgtacatagtatgaaagatatgccagccgtacttccagaaggtttaatgattggctgtacaccaaagcgtgttgaccctcgtgatgcttttatctcaaaaaatggagcatcgtttaaagagttagcggaaggtgctattttaggtacgagtagtttaagacgtagtgcacagctactcgctgcgagaccagatttacaagttaagtggattcgcgggaatatcgatacacgtttacgtaaattaaaagaagaagattacgatgcgattattttagcgacagctggattacaaagaatgggctgggatgatgaagttattacagaacatttagatgaagcgttatgtgtacctgctgtaggacaaggtgcattagcgattgagtgtcgtgaggatgataaggatttattacaattgttagcgcatattaatgatacgataacagaaagaacagtggcagcggagcgagtatttcttcataaacttgaaggtggatgccaagttccaattgctggatatgcaacccttacagaaaacgatgcaatcgaattaacagctcttgtcggctctatggatggctctgttttattaaaagagacagtagtgggtactaatcctgaggaagtaggattagaggccgcggaccgtttaattaagcaaggcgccaaagaactcattcttgctgcaaataaggagcaacaataaatatgaacgctctcgctggaaaaacggtattgattacacgtgcccagcatcaagcgaaacaaatgagtgtagcagtgaaagaaaagagcggaattccattggaaattccgcttttgcgtatggaaggtatgtctcataggcaaattcaacatattgaagagcagctacattcatacgactgggttatttttacgagcagaaatggtgtagctttttttatagatagtttaaaaaagaaactaccactaaccattaaaatcgctgcggtaggtgtgaaaacaaaattagagttagaaaaaaggggctatcaagttcattttgttcccacttcatttgttgcagaagcatttgcagaagagtttctaaaagaattaagtggaaatgaacgtattttatttccgaaagggaatttagcaagagaggtaattccggttgccctacgggaaattggtatttctctagatgagctaaccgtatacggtacgaaagtgaatatagaaaaaaagcaagagcttatagcggcattgaagttagggaaagtagacattattacatttacgagcccttcaactgttactagttttgttcgtttacttaagggtacaaactggagagaatggacaaaaaaatgtacaattgcttgtataggacctattacggaaaaagaggcaagtctttattttccgtctgttattgtgccgaaagagtacactgtagaagcattactacaatgtgtttgtgaatctataaaatgaaagaatggggatagaaatctatgaactctttacaatttaatcgtcatcgtcgtttaagacaaagcgggggcatgcgtgcgcttgtgcgtgaaacgtttttacatacggaagattttatttaccctatttttgtattagaaggtgaaaatgttcgtaatgaagttccttctatgccaggcgtatatcaaatgtctttagatttattgcaagctgaaatgcaagaagttgttgatttaggtattcgttctgttattgtatttggtttacctgctgaaaaagatgaagttggatcatcagcatattgtgatcatggaattgtacaacgtgctattcagcaaattaaaggtgatttccctgagctagtagtagttgcagacacatgtttatgtcaatttacaagccatggtcattgcggtgtaattgaagatggtattattttaaatgacgagtctcttgcagttcttgcgaaaacagctgtaagtcaagcgaaagcaggagcggacattattgcgccatcaaacatgatggacggcttcgtaacagcaattcgccatgcattagacgaaaatggttttggacacgtgccagttatgtcgtacgctgtgaaatattcatcagcattttatggaccattccgcgatgctgcgcacggtgcaccgcaatttggtgaccgtaaaacatatcaaatggatccggcaaaccgtatggaagcattccgtgaagcagaatcagatgtaatggaaggtgcagacttcttaatcgtaaaaccagcgctttcttacttagatatcgttcgtgatgtgaaaaataactttaatttaccagttgtcgcttataatgtaagtggtgaatattcgatgattaaagcggcagcgcaaaatggttggattaatgaaaaagaagttgttcttgaaaaattaattagtatgaaacgtgcaggagcagatttaattattacgtatcatgcaaaagatgcagcaagatggttacaagaaggaggcgctaaataatgaaaaagtttgataagtcaattgcagcgtttgaagaggcgcaagacttaatgcctggtggcgtaaatagcccggttcgtgcctttaagtctgttgggatgaatccgttgtttatggagcgtggaaaaggctctaaagtatatgatatcgatgggaatgaatacatcgactacgtattatcatggggtcctttaattcatggtcatgcaaatgatcgtgttgtagaagcgttaaaatctgttgctgaaagaggtacaagcttcggtgcaccaacagaaattgaaaataaattagcaaaacttgttattgagcgcgtgccatcaattgagattgtgcgtatggttaactctggaacggaagcaacaatgagtgcactacgtttagctcgtggttatacaggtcgtaataaaatcttgaaatttatcggttgttaccacggtcatggtgattcgttattaattaaagctggttctggtgtggcgactttaggtttaccagatagtcctggtgtaccagaaggtgtagcgaaaaatacgattacagtagcttataacgatttagaaagtgtaaaatacgcgtttgaacaattcggtgatgatattgcttgtgtaattgtagaaccagtagcaggaaatatgggggttgttcctccgcagcctggatttttagaaggtcttcgtgaagtaacagaacaaaacggtgcattgcttatttttgatgaagtaatgacagggttccgagtagcttataattgtggccaaggttattatggcgtaacgcctgatttaacatgcttaggtaaagtaatcggtggtggtttaccagtaggagcatacggtggtaaagcggaaattatgcgccaagttgcgccaagcggaccgatttaccaagctggtactttatcaggtaacccacttgcaatggcggcaggttatgaaacgttagtacagttaacgccagaatcatatgtagaatttgagcgtaaagctgaaatgttagaagctggattacgtaaagcagctgaaaaacatggcattcctcaccatattaaccgtgcaggctctatgattggtattttctttacagatgaacccgttattaattacgatgcagcaaaatcttcaaacttagaattctttgcggcttactatcgtgaaatggtagaacaaggtgtattcttaccgccatctcaattcgaaggtttattcttatcgacagcacatagtgatgcagatattgaagcgacgattgcagcagctgaaattgcaatgtcaaaattaaaagcgtaatgtattagagaaaatcgctctccataaggggagcgatttttttattcataaagtaagctttccgcacataaatctgtaatgacatatagtttgggagggggaaaagaagtggctgcagatcattcattacgattttcattaaaagaatctgtgtggttccaaaaaggacaggaagtcgaagaacttttgtcaatttcgttagatccagacgttgagatagaagagcttgatcatgaagtaatcgtgagaggacaattagatttaacgggagagtatgttgcacgaaaagatgattcagcgtattcattaagagaactatcgccagcaaagtcaattgattatgtagaaacaagagaagatggggttaatgaacttgttcattcctttccacttgaaatatcaattccgagaaatcgagtgaaagtaattgaagagctatatgtatcaatcgaggaatttgattatgaattaaaggaaaatggttgcttacaattattagcggatatatctattaccggtttgtgtgatgaagagagaagcgaggatgaagttgaagaggaagaaacggtgtatgctgagttagaagaagattcagcgcaagaggatgaaaatagaccggcgccgcatgtagaagaaccagcatataaggaatcagatgagtgggaagattacgcatttgaaccgttccaattagaggaaagaaaagagcaggaattagaagaagagaaaatagaagaacatgaatttgtggaacgtgaagaggagcaagaaacaacgccgcaatttgaactgttcggacgaaaagatttcaagaaagaaaaagcaaaaaagcaggaagaacaagaagaagagtactcacagcgagatgaaaatgcgctttatttaacaaaactatttacgaaagaaccggaagaagaatttacaaagttaagaatgtatttcgtgcaagaaggggatacaattgaatctattgcagaccgttatgaaacgtctgtacaaaatttacaccgtgtcaatcaaacagaagatatatttttaaatacggggcaaattatttatattcccgtttcaagggtaaagacgaaataaggaagtgagtgttttcactcacttcctttcttagaggctatgttttgaatagaaagggttattcgtatggatattgagttgcgaaatcactatgaacctatcgtgaggcaatatagattggatacgcagcatatggaagagcacggaaatgtaatgaaaatttatacgaatcaaggtccatatgcactcaagaaaatagaaggcagaaagttagagcggaataactttctgcatcatattcaatatttgaaggagaaaggtttttcaaattatgtacctatatatcatgcgacggatggaagttatattttaagtgacgggacgtataattattatttaatgccttggttagaacgtgcagaaggaaacggtgatgacaatgatcaataccataaaatgtttcagacacttggaacgttgcatcaaaaaactgtgaaggaagaaacgtatacggaagaagatttagaaaaacattatacaagtatatccgatcgttgggaaaatgatggtgagatgttagaagagtttctcgtagaatctgaatcaaaatggtatatgtccccgtttgaattgcaatattgtacgtactatcatcatgtaatgagagcgcgtgaatttgcaacgaagcaattaaatgagtggaacgatgcgatgaaagaaaaagagaaaacgcgtattacttttgtgcatggtaatgtgtcacttaatcattttttatttgactatgagcggaatggctattttattagtttagaaaaatcgaagtttgcaacgcctgtgcaagatatagtaggtttttattcacggtctttaaacacatatccaatcgcaagaagtgatcggtttgaatggtttcaaatgtatcaaaaaaatttcccttttacgaaagaagagcaactacttatgtttgcgtatatgacgtatccatcgcaatttattcggcaaatccagtcttataagaaaagaagagataatcgcaacgaggaaaatgaactgcgcggagtaaagagtttgcaacaatcgcattggctcgttagcaatatagaatatttcctgtcgcaattacaagctgcccagcaagggaacggataaagtaaaggcattctccgctgatgattagccttcaccaattgggcgtttacgggcagcagggctcccatctaacttctttgcttcagctgagttttgaggtggaggtcttactgcccgcaaatagcgggggaaagaagataagtagaggattctacttatcttcttttttttgcacgaaaagctgtagttttaaatttatcttgacgaataaggtttcgttttttacactattgtatataataattaacaatcatataaatgccttgaaggggaagagtataacatgaaacgtcttcagagaggagaatcattagctgagagattctctagatagttatgttagaaggtagccctggagcatcttttctgaacggaatagttcttattaggaaaagacggatttgtccgttatcaaattaagagtataagcaaattatgaatttgtttgtaaataaaggtggtaccgcgatgtccctcgtcctttttggatgagggacattttttattttaaggagggaaaataatgtcaaacacggaaaagaatttaccaactaaatatgatcatatgtccgttgaagaaggcctttatcaatggtggcttgaaggcaaatattttgaagcaacaggagacgagaagaaacaaccgtatacaattgtaattccacctccgaacgtaactggtaagttacacctaggtcatgcttgggatacaactcttcaagatattttaactcgtacgaagcgtatgcaaggatacgatgtactatggcttccaggaatggaccatgctggtatcgcaacacaagcgaaagtagaaggaaaacttcgtgaagaaggtatttcacgttacgatcttggccgtgaaaaattccttgaaaaagcttgggagtggaaagaagagtacgcttctcacattcgtcaacaatgggggaaagttggtttaggactagactattctcgtgaacgattcacattagacaaaggtttatcagatgcggttaataaagtattcgttcaattatacgaaaaaggcttaatttaccgtggtgaatatatcatcaactgggatccagcaacacgtacagctctttctgatattgaagtaattcataaagaagttcaaggtgcattctaccatatgaactatccgttaacagatggttctggtcacattcgtcttgcgacaactcgtccagaaacgatgcttggtgatacagcagtagcagttcatccagaagacgatcgttacaaacatttaatcggaaaaacagttacacttccaatcgtaggccgtgagattccgattattgctgatgagtacgtagaaaaagatttcggaacgggcgttgtaaaaattacaccagctcatgacccgaatgactttgaagtaggtaaccgtcatgacttaccacgcatattagtaatgaacgaagatggaacaatgaacgaaaaagctggtaagtataacggtatggatcgtttcgaatgccgtaaagaattagtaaaagacttacaagaagctggcgtattagtagaaatcgagccacatatgcattcagtaggtcatagtgagcgtagcggtgcagttgttgagccttatttatcaacacagtggttcgtaaaaatggctccacttgctgaaaaagcagtagcgcttcaacaaaaagaagaagaaaaagtaacgttcgtaccagagcgttttgaaaacacatatttacgttggatggaaaatattcatgactggtgtatttctcgtcaattatggtggggacaccgtattccagcttggtaccataaagaaactggtgaagtatacgtaggtacagaagcaccagcagatattgaaaactggaatcaagataacgacgtacttgatacatggttcagttcagcgttatggccattctcaacacttggttggccaaatgaagattcagcagatttcaaacgttactattcaacagatgcactagtaacgggttatgatatcatcttcttctgggtatctcgtatgattttccaaggtttagagtttacaggagagcgtccatttaaagatgtattaattcacggtttagttcgtgacgagcaaggtcgtaagatgagtaaatctcttggtaacggtattgacccaatggatgttatcgagaagtacggtgcagatgcaatgcgtttcttcttatcaacaggaagtgcaccaggtcaagatttacgtttcagcatggaaaaagtagaatctacttggaacttcattaataaaatttggaacgcatcacgtttcgtattaatgaacatggatgatatgaagtatgaagaaatcgatttaactggtgaaaaatcagtagcagataagtggatcttaacgcgcttaaacgaaacaatcgaaagcgtaacacgtaacatggataaatatgagttcggtgaagctggtcgttcattatacaacttcatttgggacgatttctgtgattggtatattgaaatggcgaaacttccactatacggtgaagatgaagcagctaagaaaacaactcgttctattttagcttacgtattagatcaaacaatgcgtctattacacccattcatgccattcgtaacagagaaaatttggcaacatttaccgcatgaaggcgagtctattacagtagctgcgtggccaacagttcgcgaagatttacaagatacggaagctgcggcagaaatgcaccttctagttgatatcattcgctctgttcgtaacatccgtgcagaagtaaatacgccaatgagcaaaaaagttcaaatgcaaattaaagcaaaagatgaggctgtacttgctcaacttacgaaaaacagctcttacattgagcgtttctgtaacccaagcgaattaacaattcaaacagacttacaagcgccagaaaaggcaatgactgcaatcgtatcaggtgcagagttattcttaccgttagctgatcttatcaatcttgatgaagagagagctcgtcttgagaaagaacttgagaagttcgataaagaagtagaacgtgtacagaagaaactttctaaccaaggtttcgtagcgaaagctcctgcagcggttattgaaggagagcgtgcgaaagagcaagattacctagaaaaacgcgaagcagttcgtcaacgtctagcagatcttgaaaagtaaaaatgtttttagagactcactatattggtgagtctcttttctttgcgtataatagaactatgaaagttgtctattgaaaggggaaaaacatacgtgatacatacatacgaagaagcgatagggtggatccatagccgattgaaatttggaattaaaccaggattagaaagaatgagatggatgttagaagaacttggaaatccagagcgtcatataaaatgtgttcatcttgctggtacaaatggaaaaggttcaacgttaacatatatgcgttacatgttagaaggcgcgaaatataaggtaggaacgtttacctctccttacatcgaatcatttaatgaacgcattagtgtgaatggaacaccaattgcagacgaagagattactgaacttgtaaagatggtaaaaccagtcgttgaaaaactagatgaaacggatttaggggaagcgacagagtttgaaattattactgttatggcgatttgctatttcggtaaagtcaatttctgtgatgttgttttatttgaaacagggcttggtggacgttttgactctaccaatgttatacaccctgtcctcacgattattacgaatatcggtcacgatcatatgcatattttaggaaatacactaggggaaattgcatatgaaaaggcggggattattaagtctggcgtgccggtaattactggtgtacaagatgaagaagctttgcaagtcattcaaaatgttgcaaaggaaaaccatgcaaacttatacgaacttagcaagcattttacagcgttacataaacagtctaatgaagatggggaacagtttgattttacttgtcctttttccgcatttgaagatttgcaaatctcaatgaaaggcattcatcaagtaggaaatgcagcgttagcacttatggcagtaatgtatgtaaaaacatatttatcatttttaattgaagaagaggaaataagaacgggattactggaagcatattggattgggcgctttgaaaagttgcaaagtaacccggatattattatagatggtgctcataatccagaaggtatcgaaagccttgtgaaaacagtagaagcgcattacaaagataaaaatgtaatagtgttatttactgctcttggtgataaacaattacataacatggtaggccaattagaaaccattgcagatgaaattatttttacaacattcgcctttgatcgtgctatttctgctgataagcttgcatcatattcacagaaagaatcaaaattagtttttgaaaattggaaagaggcaattgatacaaaagttgaaatgatagcagaaaatgatgtttttatcataacgggttctctttatttcatttctgaagtacgaaaatatattcgcgagaaaaactagatagtctttgctatctagtttttttgttctacaaatgaagtcaaatgcatacatataagataaatatatagggttatttggcgaattcctctgacaaatatctcgtttttttatgaaatgaatatgatatgatgcggacaacgataagaggtgaggtgtgagtgtatggacaagcaatcacgaacgatctcagtgaaagtgaatggaacagaagcgaagtatgaggaaaaaaagaaagatgaatttgaatggatggtagtagaaagtgaacgaccgaaaaatgttgttccgtttcaaaaagcgaaatcaatgtctgtggaaaaataccgaaagaagtggagtaatacattaattgtaatcgttgcaactgcaatcattatcggtacggcgtttggaatggggatgcttcatttacttactggacaaggaacgacaggaggaagtgaagtgacagcttcaaggccgactggaaatggagaatcaagggtgggtggaacggcagaacaaacaccagcaccgaaagaagaaaaacaaaaagcacaggcaggaacgtcattggatccgatgaaattattttttgttcaaggggggctttattcttctgaagaaaagggacaggcagctcttgaagaatggaaaggcaatgggggcattggtgctttgagaccgagcggtgataagtatgcaatagttgttggtattgctagcgatgaacagtctataaatcaattaatgactaagtataaaaatgatggtgtctccgttttaaaaaagagctgggatataacagataaagcattgctgaaagatgataaagaagtagggacatttttaacaaaagtgcagccattatacactcatttagcaaaatatgcttctagcgtacaagttggtggaaaaagcagcccaaaagatatagaagcaattgaaaaagaatggaaaaaggttgaaaaagaaggggaaagtatgaaacgagaagaagcaaagaaactgtatatgtatacgtcggtagctgtacaaacagtaaaagatgggaagatggataaggaatctttggcgaaattaaatcaagttattattgatggtttactctcgtatgaaaaaattgtttcgtagaaagtgaaatgataggataataaaatgagtaagaaagaagtacatgtacttctttcttttcttttgaatttagagcaaagtgctttctctatgatgggaatataatcgtatgcaataaagaagtgttattttagttagagaaattaatatttctttcatttgtgggcaaactattcctttgatacgattaatataaattgttctgcttcatgtgagaaaggaaggagaaaatatgagaaaaataattttagcttcaggatcacctcggaggaaggaattgcttgagttagctagtgtgccatttgaaatcgttgtaagtgaagtagaggaaacaattggtgcatattcatcgccttctgatattgtaatgtcgcttgccttgcaaaaagcatcagcggtggcagaaaataatagtgatcacattgtgttaggtgcagatacaattgttacatatgagtcgcgtattcttggtaagccttctaatgaggatgaggcgaaagagatgttacaattactatcagggaaaacacatgaagtgtatacaggtgttgcgattatagcaaaagaaaaaacggttactttttatgagcgtacagaagttacattttgggagttaacagaagaggaaattgatacatacgtcgcgtcgaaagaacctcttgataaagccggtagttatgggattcaaggtaaaggatctattttcgttcaaaatattcaaggggactactatagtgtagttggcttaccaatcgcacgcctcgttcgggaattaaaacaatttgatattgatgtaacccatgcgtaaaattgcatggggttttctttgagagaacaaataaaggggtggagagatgaacggtattcgtgatgttgtaagagaagaacagccacgggagcgtttattgttagaaggtgctggaagtttatcaaatcgagagcttctcgcagtgttactcagaacaggttctaaagaagaaacagttttaaagttgtcagataaaattttacaccaatttgatggcttacgtatgttgaaagatgcaacattagaggagctaattagtatacatggtattgggatttcaaaggcatcgcaacttatggcagcctttgaactaggcagaagaatggtacgtttagaatatcaaaatagatatagtattcgaagtccagaagattgtgcgaaatacatgatggaagaaatgcgttttttacaacaagagcattttgtttgtttatatttaaatacaaaaaatcaagttatacataggcaaacgatctttattggaagtttaaacacgtcaattgtacacccgagggaggtttttaaagaagccttccgtcgtgcagcagcctctatcatatgtcttcataaccatccctcaggagatcccacgccgagccgtgaagatattgaagtaacaaaacgcttagtagaatgcggccagattatcggaattgaagtgcttgatcatattataataggtgaccataaattcgtgagtttaaaggaaaaaggtcatatttaagactatgctttttacttattttgttttataatgtgatttatgagttttttgtagaaatttatctacaaaaaggataaagatataaaaaacgtactgtttttataatataaattaagaaaaaatgagtccgtgaaaacaagaaaggaagataaataatatgtttggatttggtggatttactcgcgatcttggaatagacttaggaactgcgaacacgcttgtatatgtaaaaggaaaaggtgtagttttacgtgaaccttcagtagtggcgttacaaactgatacgaaacaaatcgttgctgtaggtagcgacgcaaaacaaatgattggtcgtacaccagggaacgttgtggcacttcgcccgatgaaagacggtgtaattgctgattacgaaacaactgcaacaatgatgaaatattacattcaacaagctcaaaaatcaaacggtttcttctcacgtaagccgtatgtaatggtatgtgtaccatctggtattacagctgtagaaagacgtgcagtaatcgatgcgactcgtcaagcgggtgctcgtgatgcttatcctatcgaagagccatttgcagcagcgattggtgcaaacttacctgtttgggaaccaactggtagtatggttgttgatatcggtggtggtacaacagaagttgcaattatttctctaggtggtattgtaacaagccagtcagtccgtgttgctggtgatgatatggacgattcaatcattcagtacattaagaaaagctataacttaatgatcggtgaaagaacagctgaagcattaaaattagaaattggttctgcaggcgagccagaaggtatcgagcctatggaaattcgcggtcgtgatttagtaagtggtttaccaaaaacagtactaattcagccagaagaaattgcagatgcattaaaagatacagtagatgcgattgtagaatcagttaaaaatacgttagaaaaaactccacctgaattagcggctgatattatggaccgcggtatcgtattaacaggtggcggggcattactacgtaatttagataaagtaattagtgaagaaacgaaaatgccagttcttgttgcagaagatccattagattgcgtagcaattggaacaggtaaagcattagacaatatcgatcttttcaaaactgctgctcgataatattgcaaaataaaaatcagtgaaattaagagggtgtgaacgtgccacagtttttcttaaacaaaagattaattgttttgttggttagtattattcttctcgtggcattgattggaatctcattgaaagaacggaacagtttaacatggccagagcagtttgttaaagatactgtcggtgttgtagaacgtgtattccaaaagccagcgaaatacgtagctggattcttcgaaaatgtagaggatgtaaagcgcacgtatgaagagaataaagaattaaaagcaaaattagataattatgcaggtctatcagggaaagtaaaacaattagaagatgataacaagaagctacaagagctaactggtaaaaaagagttaaatagcgggtatactgaaattccagctactgttgtttctcgtaatccagataaatggtacgatttaattggaattgataaaggggcacagcaaggaattaaaaaagatatggctgtagtaacttcacaagggttagttggaagagtgaaaagtgtatctcagtttacatcatcagtagaattactaagttctatgagccgaacaaatcgtgtttctgctattgtacaagggcaagagaaaatctttggattgattgaaggttatgacaaagaaaagcaattacttcttttcacaaagattggctctgatgcaccggtagtgaaagatcaactagttgtaacatctggactgggtgatattttcccgaaaggtcttgtaattggaaaaatcgttgaagttcagccagatgcatatggcttaacaaaaacagcttatgtaaaacctgccgctgatttaaatgacgtagagcatattacggttgctaaacgtgcaacaccttcagcgccattagaataggaggagaagaagagatgatgaagatattaaaaagagcagctcttcctcttttgctcctttttgtgtttctatttgaaaatatgtttgctactgttgttccaacggatgtgttttggaaagacagcatagcagcaccgcatttctttataatcgtcttatgttttattacagtgtattatagtccggtccaagggatttattacggactattatttggcttcttatttgataccgtatacacagaacttgtcgggatatatatttttgcttatccgattttagcttatttagtatatagtgtgatgaaagtactacaattgaatttatttattgttgtttctatcatattagctagcgttgtagcactagagtattatgtgtatggattcttaactttattaggacgtactcatatgccagcgtatgtctttttcacagatcgtctcctttctactttattgttaaatgctattttcttattgatagtttgtttcccactgagacgatatatagtgcgtctttcaaaagcgatggaagaaaaagaaaaaaggattttctaattttatgtcgaattgaatcggtggggtgaactttagtggaagaaaaaaagcaacaaaatgtaacgataaaagggacaaaagatgggataacgcttcatttagatgattgttgttcattctcagaattattggtggaattagacgaaaaactttctacacattactacgatggtgatgggcgctctttaattgaagtgcatgtgaaagtaggaaatcgttatttaacagaagtccaacaagaagagattcgtacgttaattcgtaataaaaagaatcttgttgtggattcaattgaaagtgatgttatcactaaagcagaagcaatagcttggaaagaagaaacagaaattgtccctatttccaaaattgttcgctctggacaagttttacatgtaaaaggaaatttgttgttaattggagatgttaatccaggcggaacggttatcgctggggggaatatttttgtcgtaggatcattaagaggaattgcacatgctgggtattatggggattcggatgctgtaatcgctgcatctgttatgaacccgatgcaacttcgaattagtgatgtggcaatgcgggctccggaagagaaagaagacggagcggaggcggcagaatgtgcgtatattaatgagaacaatcacattgttgtcgatcgcctgcaacttctcactcatctcagacctaatttaacaaagttagaaaggggaattgtatagctgtgggagaggcaatagtaattacatctggaaaaggcggagtaggtaaaactactacatctgcgaacattggtacggccctagcgttatctggaaagaaagtgtgcttaattgacacagatatcggtcttcgaaatttagacgtagtaatggggctggaaaatcgtattgtatttgatcttgttgatgtcgttgaagggcgttgccgtttacctcaggctcttattaaagacaaacgttttgatgatctttatttattacctgcagcacaaacgagtgataaatcagcggtaacacctgaacaaatggatgaattaatacaagtattacgtcaagattatgattacatattaatcgattgtcctgcggggattgagcagggatttaaaaatgcggtagctggtgcggataaagcaatcgttgttacgactccagaagtatcctcaatgcgcgatgcggatcgtattattgggcttttagaaaaagaggatattgaaccaccgaaacttgttattaaccgtgtacgtagtcatatgcttcatgaacaggatatgttagatgttgatgaaattgtacgtacattgtcaatcgagcttcttggtgttgtcgaagatgacgatgaagttattcgagctacaaatacaggtgaacctgtggcgttgcaaccaagcggaaaagcagcgttggcttatcgtaatattgcaagacgcttgttaggtgagaatgtaccattacaagcatttgaacaagaaaaggtatcggtatttgcaaaggtgaaaaacttctttggaatccgttaagagcacttcgcacatatgcgaggtgctttcttttttcttcacacgaatatctttctttcttagctcatacatatgtacaaactgtatacaactgtttctaatgaaattagcttaacgaaagaaaggagacagtatgaagaatagacgcgtagaagaaattaaaaagcggattgcaaaaaggaaggccgagcaagaaaggatggaggaagagcagtattttaacggagggaatttcgatagtgaagcggtatttattgaagatggagaaaaggaaatgcatcctttatttcgaaaggaagtctttttcttcaaagttttattatcagcaatattagttctttcggttgctattttatataagaatgctccttcttcattcaatggagctaaagctgttacagaaaaagtgatgaaagaggaatttcagtttgctactgtagcgaaatggtatgaaaagcaatttggaaaaccgctcgtattctattcgccgaacgagaaaaaagaaggaagtattcagcaaaaggattatgcaattcctgcttctggaaaggtaatgcaagggtttcaaaaaaatggccaaggtgtatttgtccaaacagctacaaatgcaaaagtggagtcagtaaatgaagggttagttgtttttgcaggcaagaaagaggaacttggaaatacagttcaaattcaacatgcagatggtacggagtcatggtatgcaaacttaaacgatatgtcagtgaaattatatgattacgtttcaaagaaacaaaaaattggaacggtgagtaatgatacaaatgataaaaacggaaagttttatttcgcgataaaaaagaatgaaaaatttattgatccgatccaggtgatatcatttgattaaatatagggacgttttaacgaaaatttccgtgcatccattattttgggttattattgtcattggtatttttactgcgcgttttaaagagttactactgttattttgtattgttcttattcatgaacttgggcatgcttttgcagcagcacactataattggcgtataaaaagaattcaacttttgccgtttggtggcgtggccgagcttgaggaacatggtaataagtcattgaaagaggaacttgttgtcgtaattgcaggaccgattcaacatgtttggatgatgctggtaggttatatgttgttcgaagtcggttggctgaatacagatttatattatttctttatgtggaataatataattattttagcatttaatttactccctatttggccgttagatggcgggaaagtattgtttaatgtattatcatatcgtttcccttatttacaagcacatgaaaagatgatgcaattgtcatgtgttttttttggtgtaatattaggatggcagttactctggaatagtaacaatattatgatgtggatactactcatatttttagcagtgtcattatatcaagagtggaaacaaagacggtatgcatttatgcgttttttattagaacgttattatggaaacaaaagaggaatcgaaaagattgcacctattgaagtgcaaacggaagatcgtttatatacgatctttacaaaatttcgtagaggatataagcattctattatcgtccgtggaaaatataaagagcattacacattggatgaaaatgaattgctctatgcatattttactgaaaaacgaacaacttcatcagttgaagaattaatcggttagtgttgacgatagcactaaccttttattattgtaaaagcaaagaagattataaagtgaggaaataattttgaaaacgttatatgtgaattacgctggttcggaaaagcgcgttgcaattgaagagaagaaaaaaattgttgagtttttatggaaacgtaatgaagagcaagagattgttgggcatatttatgttggacgtgtcgtaagaacaattgctggaatgaatgcagcttttgtaaacatcggtttagaaaaacatgcttacctttcatacgatgatgtaccatcttcttatcgtatacatgaagggcaagcgatactcgtacaagttgtgaaagaggcaattgatacgaaagggcctaaattgacagcgaatatagaatttaccgggaaatatgtcgtttatatgccgtttgatgagatgcgcgctgtttctcgaaaaataaaaaataataaaagaagacaacagttactccaaattgaaatagagggaacggggggatacattttccgctctgcttctgaaaaaggagcaattgaagaaatacaagctgaaatgcaagggttacaacagttgtatgaagagttaaaaagaaaagagggccaaggaaaggcgccgttattacttcatcgaccggcgacctttttagatcgtgtatttcaagagaatccaattgaaaccattgaaaaagtagttgtagatacaagaagtatagtaaaagaattagaagacaaagttggaaaagaaaaagtatctttttataatgaaaagtcttcgatgtttaaccattttggaatagagcgtgaaattgagaaagcactccaaaaaattgtgtggcttccaaatggtgcttatttaattgtagaacaaatggagacgatgactgtaattgatgtgaatacgggcaagtttacgggaaaacaaaatttacaagatacagtacttcgcacaaatgagatggcagctgaagaaattgcacgccaattaagacttcgtgatattggtggtatgatattaattgattttattaatatgaaaaaaagagaagataaagaaaaggtaagagaatgtcttatagctgctatgcaagatgaccgcacatatacaagggtgctcggctttacggagctagggattttggaaatgacacgtaaacgtaaaaagcattctttacgggacgtattattaaaagagtgtgtaccttgcaaagcgacgggttatgtgatgtcgcatgaaacaattgcgtatgagttagagagagaactaatcacatatggcaatatagaagatgaagcggtattaatcgctgcgcctaaagaactgcaaaaacagtttttgcaaaaagaattacaaaaaaatattccatttgaaatttatttcaaagatgataatatcgaaaagtatgctatcgttcgttttggaagtaaaaaagaaattgtagagcggaaaaaatagttagcagaacatttattgacaaccgtctatgattcatgataacatctttatgttatagtttatagcacctaaacggctatatgctacaaccgcacaagacaggttccctaaaggcatttatgtctacctcgtttttggcgagtcttagtaattaagaggaggtgcaagtatgtacgcaattatcgaaacaggtggaaaacaaattaaagttgaagctggtcaagcaatctacattgaaaaattagatgttgaagctggtgaaactgttacttttgacaaagttcttttcgttggtggcgaaaacgttaaagttggtagcccagttgtagaaggtgcaacagttactgcgaaagttgaaaaacaaggtcgcgctaagaaaattatcgttttcaaatacaaagcgaaaaagaacaatcgtaagaaacaaggtcatcgtcaaccttacactaagctagttgttgaagctatcaacgcttaattctggttaacatgattaaaattacgataagtcgcacgaaattaggaagtatccaatcatttaaaatgactggacatgccgattatgcgccacatggacaagaccttgtctgtgctggaactacagcggttgtgtttggttctataaatgcagtggaagaactttgtaatgtgcaagcaactattgaactcggaagtgatggcggattcttaacatatgaattgcctaatgatttagacgttcatacagcagaaaaagcacaaacgcttttagaaggattagttgtttcgcttaagacgatcgaacttgattacggaaagtatatccgtttaatagaaaaagtgcaggaggtgtaacgtatgttaagattagatcttcagtttttcgcatctaagaaaggtgtaggtagtacaaagaacggtcgtgactctcagtcaaaacgtcttggtgctaaacgcgcagatggtcaaacggttacaggtggttcaattctttaccgtcaacgcggtacaaaaatttatccaggtgttaacgttggtcgtggtggcgatgacactttatacgcgaaagttgacggcgtagtacgctttgagcgtcttggtcgtgaccgcaaacaagtgagcgtatatcctgttgctcaagaagcataagaactcacggaaaactctaacctgagtgcaggttagagtttttctatattaaggggtatctaaatgaatgaaaaatggacaattatagatgcattgcgccattcaagacatgattggctcaatcgtatgcagatggtgaaaggaaacctttcccttggaaaagtggaagaaattcatagtctcatcgatcgttttgtccaagaagcgagacaagaatccaatctgatggggctatcaatgcctttattttcagagtggattttaacatataattggaaacagcagccgtgcttattggagtacgaagtattagggaaattacataacttatctcacttagatgagactgtatgtacatggacgaatcaatttttctcgatgcttcagcatagtttagacgtatatgttgaaaattatgtttgtatcacaattgaatgtgacgcggataatgctcgtttcttttttgattttcgtggtaagctaacgagtgtagaagaactacagaattggcttgcgacccaaaacaataaatggtattccatttcttatacagtgcgagacgaagaagtctcagttatattacaaccaattgaaaaaagtgtggtgaaataatgtttgtagatcaggtcaagatatatgtaaaaggcggcgacggtggtaacggtatggttgcgtatcgtcgtgagaagtatgtaccaaaaggtggcccagcaggtggcgacggcggtaaaggtgcagatgttgttttcgtagttgaggaaggcttacgtacattaatggacttccgctaccaacgtcatttcaaagctgatcgcggtcagcacggaatgagtaaaggtcagcacggacgtaaatctgaagatttacttgtaaaggttccaccaggaacagtagtaaaagatgaaaaaactggtcaaattcttgccgatttagtaacgcatggacaaactgctgtaattgcaaaaggtggccgcggtggccgtggtaactcacgttttgcaacagctacgaacccagcgccagaaatcgctgagaacggggaaccaggtcaagagcgtgatgttattctagaacttaaagtactagcagacgttggacttgttggattcccaagtgtaggtaaatctacattattatctgttgtatcatcagcgcgtccgaaaattgcagagtatcacttcacaacaatcgttccaaatcttggtgttgttgaaactggtgataaccgcagcttcgttatggctgaccttccaggactaattgaaggcgcacatgctggcgtcggacttggacaccaattcttacgtcatattgagcgtacacgtgtaatcgtgcatgttattgatatgtctggtttagaaggccgtgatccatatgaagattacgtaacgattaataatgaattaaaagaatacaatcttcgcttaactgagcgtccacaagttgttgttgcaaacaaaatggatatgccagatgcagaagaaaacttacaagcatttaaagagaaagtgggagacgaagtaaaaatcttcccaatctcagctgtaacaagacaaggtgttcgtgacttattgtttgaagtagcgaacttaatagaaacaacaccagaattcccaatacatgaagttgcggatgagtctgatacaagtgtaatgtacaaatttgatactgaaggtgttaaatttgaaattacacgtgaaagtgatggcacgtttgttatctctggttacgatattgagaaaacattcaagatgacagacttctcacgtgatgaatctgtacgtcgtttcgctcgtcaaatgcgcggaatgggtattgatgaagcgcttcgtgcacgtggtgcaaaagacggagatattgtaaaaattcttgaatatgaatttgaatttatcgattaagactgccgaaatacggcagtctttttttatatcgtaaaaatcggatttatataggaaaaaatccccactaattaaattttcaatttataataaaaaggggagtggttttagaagaatttttttatggggagaaaacgaacatgtataaaatattaattgtagaagatgatgagaaaatcgcgggaatattagaagagcatttagaaaggtatggctatcaatcatttagagcaagtgatttacgtcaaataaaagatgagtttgtaaaagtgaatcctcatctcgtgttacttgatattaatttaccgtactttgacggtttttattggtgtcgtcaaattcgtactgtatcgaatgcaccaattatttttgtttctgcaagaacaggagaaatggatcaagtaatggcgattgaaaatggcggcgatgattatattacgaagccattccatttagatatcgtaatggcaaaggtgaagagtgcacttcgccgtggttacggagagtatgcttctgccgctgagagtgattgtttaggtgtaaatggactgttgttattcccgtctcagcatattgttgagtggcaaggacaacaaactgaactgacaaaaaatgagttttacttattagagtgtttaatgaaacaggtgaatcaatatgtaacgcgcgaagaactgttagaagctctatgggatgaagtagcatttgtggatgataatacattaaccgtaaatgtaaaacgtgtaaggaagaaactagaggagttaggcattaaaaatgcaattgtaacgaaacgtggatatggttatgcgctttttacggagtggggcgaagggcatgaaggttaaaaattaccttatgggccgcttttctttaattctttcttatattgttagcctttgtttatttgggctcgttttacagctgcaaagtcttttagaaaagaaatccattgattggagtacgtggttatatggacttttattaggaacagttgtgtttactgtatacctcatttacgattaccgaaaacggagtgtgtttttaaagaggatcgaaaagtatgttactgatggaaatacattacatgactctttacttattgatgaatcttatacatcagagcaagaaatggtcgttgaatcttttacgttattaagacagcaatatatgaatgaagttcataaacagcatgcgaaagagcaacagcaaatgatatttatgaaccaatggattcaccaaatgaaaacaccagtatctgttattgaattattgctgcaaaagtttggcaaagagcatcgtgaggcaagagcaacagttgaaagtattcgtgaagaaaataaccgtatactaaatggtttagatttagcgttacatatggcaagactagagcagtttgcgaaagattataagatagaagtagtaaatgttatagatgtcgtgcgaggtattattaatgaaaatcggaaatcctttattcaatcgtctgtatttccgaaagtgatgtttgaagaagatacttgtatggttgcatctgatagaaaatggctgagtattgctataggtcaaattgttgtaaacgcaatcaagtatacaaaaatttcagcggcagagaaaaaagaaattcaatttcaaattgaagagaaaaatcaaaaggtgttattacatattaaggacaatggaattggtattccagagcaagacgtaaagcgcatatttgatccattttttacgggaataaatggacgtaaaacgagagaagcgactgggatgggcttatatattacgaaggaaatttgcgataatttacatcatggaatgtatgtccaatcggctgaaggagaagggacaacattcacgttccaatttgcaaaagatgaagaatatcatacattgatgagaaaaatgacaaaactgtaagataacaaaacgttttgtaagggaaatcactcgtttctttttcttatttttcttatagtaaatgtaagaagaaaacacgtagggggattagaaatgagtgttcttgaagtaaaaggattaacgaaggtgtaccaatcaaaaggttcagtagcgacgactgctttaaacgatataaattttaaaatagaagaaggcgaatttgtagggattatgggtccttcaggaagtgggaaaacgacgcttttaaatttattagcaacaattgataagcaaacttcaggtcatgtgcttgtaaatggtgaagaaattaatcaaatgcgtgctgcaaaattagcggagtttcgccgtacacatttagggttcatcttccaagattttaatttacttgatacgttatccattaaagaaaacattattttaccacttgtaatggcgaagaaatctgtaaatgaaatcgatgcgaaagtactagaaattgcgaagtttttaaacatcgaagaaattttaaataaaaaagtatacgaagtatctgggggacaacaacaacgtgcagcagcagcgagagcaatcattcatgaaccgacgttaattttagcagatgagccaactggaaacttagactcgaagtcagcaaaatcgctaatgggtgctctgcaagatttacacgagcaaaagaaagtaacgattgcaatggttacgcacgatccagtagcggctagttattgtgaacgtatccttttcatacgcgatggagaaattttctcggaaatacataaaggaagaacgaaacaagcctttttccaagaaatcctggacgtacttgcgatgctaggaggagaatatcatgaactttcgccagctcgcgcttaataacgtaaaaggaaattggcgtaactataaagcgtttcttataagtagttgtttatcgattgtcgtatttttcatgtatgcttcttttatttatcatccagatgtcgtaagcggtaatattagtatgagaaagatgatcacaaaaggattagaatcgatgaattatattgtggtcatcttctcggcactctttattttatatgcaaattcaacgtttttacgagcaagaaaaaaagagtttggtctactaacattaataggcggaacgaaatcgcagctcggccgaatgattatattagagcaactgatgttaggtagtattgcaattgtagttggtattggggttgggatgctttgttcaaaattatttttccaagcgttaagcgtattattaaaaatagataagacacttccacttgtttggaatagtaaagcagttcttattacagctggtgtatactttattctatttttaatcctatcattgtttagtgtttggacagtaggacgcttgcaaattattgatttattaagagaggcaagaaagcaaaaagtagagccgtttgcatttacatggttatgtgtagttggtataggatgtattattgttgcatatgtacttagcttccaagtaacgtttctgaatttcctcatcctttttttaccggtggtgggactgacaattggcggaacgtatttactatttacacaaggtagtacagttgtattaaaagcattacaaaaaagaaagcaatctttttatacgtacccaaatatgttcgtccttagcaaccttatttataaaatgaaagataatgctcgttttctatttgtaatttctatcattacggcggtagtatcttcagcggtgggtacactgtacgtatattttgaaaatatgagtgcgaaaacggtagaacttacaccacatgctatttcatatgaggaaaaggggttaaatacgcataaccttattaatgaagaaaaggtacaggagcttgtgaagagacacgggtttgaagatgcgcgaaaagtaacatacgttaaactaccggcaacacagaaaataacgttgtttaatagtgaacatgaagtaccgatgacgattatttcagaaaaagaatataatgcagaagtgcgcaaacaaaagagagagcaacctacagaagttcataatgcaccaggtagtgcaacgatggttatggttgatatgtcaaatgaactgatgaagatagatcgtacgaaaccgtatgaatttacaattaacggacaaaagcagtctgttcaattaaataatccaacgcagtattctgtttttaatgatagtgaatatctcattgtaaatgatcaagattttgagaaatatgcaaaactcgtaccagatgaagaaaagtcgaaatattacggttattatattgaggattggaaaagtacagaaaatcttgtattagatttgaaaaatgaaattgtaccagaaaagcaaggggaattgagaaattcagtgtttgcgtataaggatataagagaaggtggagcaattacaatgttcatcggtttcttcgtagcggtactgttcttcttcttcgcttgtagtatgacatactttaaatggtttaacgataaagaacaagatcgtattcaatttaaatcgttaaagagaattggtatgacagataaagaaattcgcaaaattgcgattcgacaaatgggagttatcttctttatcccaattttaatcggttccattcatagtggatttgctcttcatacgttagggaaaatgctttatattaatttatggaaatcaggtgcgcttgtaattggagcatacattttagcttctgccatttactttatgatcgcgcaaagaggatatttaaaacacgtaaaaagctaggggaacctctagctttttgcctatgtagtaagttacaggaggacgatagatgaacattcggcaactagcgctgcaaaatataaaaggaaattggcgtaattataaagtgtttttcttaagtagttgttttgcaatatttgcttcttacgcatatatgtctgtcattgtgcatccatatatgcaagagacgatgtggtatcaaaacgtacgctggggacttatcatatgtaatgttataatcatttcttttttcgtcatatttattttgtactctacttctattttcatagaagcacgtaagaaagaattagggttatatatgttaatgggagcaacgaagtctaacgtaataggagtgattatgaccgagcaaattttaatcggggtcttcgcgaatattttcggtattgggcttggtatgatatttttaaagctcttttttatggtatttagtatgttactggggcttccgaaagaactccctgtcatatttgacgtaagggcgattggtgtaacatttattacatatatggtcgtttttattttgttatcttttataagtgctttacgtatatggaatataaaaatcattcggttattgaaagaatttcgaacagataaaaaagagaagaaaacatcaaagtggctctgtttattcggttttgcttgtttagtgggcgggtatgcattggcgctacaagtgacgatggctacgatagcgatatactttttccctgtgtctatacttgtcttttttggaacgtacttttcttttacacatggagctacccaagtgttagaaataataaagagaaataaaaagattatgtatacatatccttatttatttatagtgaatcaattgtcacatcgaatgaaggaaaatggtcgctttttctttctgatgtctatggcaacgacgtttgtagttacagcaacaggtacggtgttcttatatttttctagcatgcaagatatgtggcgaactggaggggtacactcgttttcgtacatagaaaaaggtatttctactcatgaagtctttgaggaaggtgcggttgaaaaattactgcatcaatatgggtatgacgattttcaatatatgagttttgttggagtgtatgcatcctttcagtctagtaaaggagaaacaacaatagtaccgcttataaaagaaagtgaatataaccaagaagcaaggaaacaaaaacaaaaaatgtatcgtcctaaaaaaggtacagtgacacttgtttattataataaatacaataattcgaatgtatataatcaaaaagagattgaattgcaagtaatgaatcaaccatatcaattcgtatttaacggtcagaaagaaggggttcaatttaaccatcacccttcgtacattaatggtctgttcttcgttatgaatgatgaagattttgatagtatagcaaatcaggttcctgattctgaaaaaatgatatatagaggctacacattaccaaatatcgaaaagacgaagaaattaaatgaagatttacggaaacatatgaaacaagataataataatgcatttcgaagcaatatggagttgtatgtaaatgtgaaagaaggcggcgatattactctatttgtaggctcatttattagtatattattctttcttacttcatgtagtatcgtttattttaaatggttccataatattgcatcggaccgaaagcagtatggtgcactctctaaacttggaatgacgaaggaagaagtatggaaaatttctcgttggcaattatgtatgctattttttgcgccaattatagtagggagtatgcatagtgcagttgcgttatatacgtttcataatacgctttttatggatggatcattaagaaaagtaggtttgttcattctgttttatatcgcagcatgtatcatttatttcttcttcgctcaaagagaatataagaaacatttagactagcgaacgctagtctttttttaatattcgaaatttacatagaagaatataaaaaagtatggtataacagtaagaaaacgaaaaagaggggaaaagacgatgattcgagtaggatatttaggaccagaagcaacatttacaaatatggcggtgagtcgtttttttccggaagcagagcatgtaccatatcgaacgattccagattgtatagatgcagctgcaaatgaaaatgtagacttcgcagttgtaccgttagaaaatgcaatagaaggttcagtgaatataacggttgattaccttgtacatgagcagccgctttccattgtaggagaaattacagtaccaattcagcagcatttacttgtacatccgcagtatgcagaagtgtgggatgaagtatatgcagtgcattctcatccgcatgccattgcacagtgccataaatttttaaatgaagaattaaaaggagtaactgttcgagatatgacatctacaagtgctgctgcgcaatatgtgaaagaacatcctgaagagaaaattgccgctattgcaaatgaagcggctgcagaaaaatacggattaacaattgtgagacgtagtattcatacgcataaaaataatcacacacgtttcttggtactccataagaaaaagaaagcagtactcccgaataacggagagaatcgcggagagaaaacgacgcttatgataacgttacctgcagattatgcaggtgccctatatcaagtgttatcagctttcgcatggagaaaattaaacttatcaaaaatcgaatcgcgtccgatgaaaacaggtcttggaaattactttttcttaattgatgttgataaagcatacgatgacgtattattgccaggcgtaacgatggaacttgaagcactcggtttttctgttactgtgctggggagttattcttcttattggttgtaagatgtagatggaatgttggtatttgtctaatcgtcaatatcatttcattgcctaatatattttttaatagattaataaaatcccacctgcagaaggtgggattctttattttaacttcgcaagacgatcttctaactgaccacgccaaatatcagctagttctggaacagcaagaattttttcaatgccatctttatcttttctattatgaaaataaatttcgttagagaacaagacagaaacattgctcggttgacgttctagtaatgtaattttagaatctttacgtacagtaccttcttgaagaacgcggcataggtagcctgtaaatccagttgctacaatgcgtggcagtatgccagggatgccaagacgttttgaaattgtgctacaaggtactcttgcttgtgtcacttgaatgattgtttcacctagttgatatgtatctccgatgcaaacatcacgctctaacatatttgttacggtaatgttttcgccaaatgtggaagctggaagcgtagtttgaaattcctcttcccatagtgcgtaatgctcgtgtgggtacacacaaacagcacgatcaggaccgccgtgatgttttaaatccgctacgtcatcaccaagaaatccgtcttttgagagaaaggcctcttctgtaggatctttacatatacctgttatcatttctttatcttcgccatatttcatttgtttcggtttgccaatgctaaagtgaacgagttcaattcccatgtttgatctcctttacgattgattacaatattatagcattaaaaaagcacagaggatgataaaaaactctgtgctttacattaataaacgagaaatcctgctttatctaacgcctcacaagcagcatctaacttttctttagaatctgcttcaattgtatgtaagtgaataccgtctgttagttgcgatagataggaagcatttgtgttttcgattttttgtaaatattgctctacatcaaatcgattacttaccataattgatgctgttaagtcgccgtatacaggatgctcaacttttacatctttaattgtaacgccatggtcaacaagcattgtaagttcttgacgtacttctgctggtttgtgctggcatacgattacgcgttcaaaagcttgttgtttctcttgtggttttaaatataaatagccttgggcagtcgcaataattggttcgtttcgtgctttaagcaaggaaatatcttgcacgataacttgtctacttacgtttgtcttcttcgatagttcattcccagataacggctcatttgcagcgagaagccactgaaggataagctgtcgtctttcttcgcctaaaatctttttttgttcattttgtttcattatgatttaacacctctataaaattgatttccaattgtgtgtagtgcatgaatagtagtatcaatttgatctttcgttgtttgttgtccgaaagagaagcggacatattgtttggcctcttcatacgtttttccaattgcaagcatagttttcgaaggttcttgtttaccgacttggcaagcacttccggtggaaatggcgataccatggcgattacattctaacatagtatattgaccttctattccttttattgtaaccccaacaatatgtggtaaacaagaagtagaatgaccttctacttcaatttctagcggaagtgtttgtatttgccctaaaaagtaggagcgtaactctttaaaacgtaaactttcttcccattgagtttttaatatattttcagcagctgttaaaaaagatgcgatgccgggaacgttcactgtacctgggcgaaatcccttttcgtgagaagttcctggaaatacttgctcccagcgcgattgcggatttatgtagcaagcgccgacaccttttggtccgtatattttatgtgctgaaacagaaagactatcaatccccatctcaaaaacatggataggcagtttaccaaacgtttgcacacaatccgtatgaaataaaacattatatttttttaaaagtgccccaatttctgtaatgttttgaacggttccgatttcagagtttccatgctgtatacttgctagcacagtatcttctgtaatagctgcctctaaatctactaaacaaatgagtccatttttatcaacaggaatttcagtgatcgtatagccttttgattttagagattgaaaataacttcgaatggatgcatgttccataggtgtcgtaataatatgcttcttattttgggcatttagaagtgattggatcgcaagatagttcgattccgatccaccacttgtgaaaaatactccttgttcttttcctccaatcatttccgcaaatgtttttcggcaaacttgtaataaagaagaagccgttcctccaatatcatgtaagctttgttcatttccgaagtattgcgacgctgctttcatatatgtttgtaacgcttcctcgctcataggtgtagtagctgcatagtcaagatatatcatcatgtaagttcctctctctagtaagagttacatttcttttactttttaaatggtagtgaaaataagaattataaaaaaactcttgtcattattttaaaattatgtaaatataggtgtcaagacagttgaaaagtgtaaagtaggaggcaacaattatgccaagcgcagatgtcttaattattggaagtggcgttgcggcacttcgtgttgcaaaagagatttgtcacgaaaagaatgtgattattatcacaaaggagacgaaacgtaataataatacacatttagctcaaggtggaattgccgcagcggtagctacatatgacaatcctaatgatcattttgaagatacattagtagcagggtgtcattataacaatgaagaagtggtccgttatttagtcgaggaaggaccgaaagaaattaataaccttattgagaatggaatgaaatttgatggagatgaaacaggtcctcatcttggaaaagaaggagcgcatcgaaaacgtcgtattttacatgcaggtggcgatgcaacaggaaagaatttattagagcatcttattcaagaagtagctccatacgttacggtagtggaacaggaaatggtgctcgattttattatagaaaaagataaatgtgttggggctttaactcgcaacaataaaggagaattgaaacgttacaatgcagattgtacggtgttagcttcaggcggtattggcggtttatacgcctttacttctaatgatgagacgattacaggcgatggacttgcaatggtgtaccgtgcaggcggagagcttgtagatttagagtttatacaatttcatccgacgatgttatacgcgggtgggcgttgttccggcctcgtgtccgaagctgttcgcggagaaggagctgtccttataaatggaaaagggcagcgttttatgatggatatacattccgaacaggatctagcacctcgtgatgtagtcgcacgggctattcatgaacagctacttgcgggtgaaaaagtgtacttaaacatcgaaatgattcaaaactttgaacaacgctttccgaccgtgtcatcgatatgtaaaacaaatggagtcgatataaataaaaaacttattccagtcgtgcctggtactcattttcacatgggcggcgtgaaaacgaactgtgatggagagacgtctattccgaacttatacgcagtcggtgaagtagcttgtaacggagttcatggtgcaaatagattagctagtaattcattattagaaggtcttgtgtttggaaaaagaaccggacgacacattttatctagagagacaaaagaaaaggtgaacatgctagctgaaaaggaaccaaagttcatcgttctgaatcatttaccgacgaaagaagaaatacaaaaatgcatgatgaaatatgttgggattgtgcgaacagagcaaagtttatcttatgcgaagagatggtttagtaagtatggtgttcgaaatatgatattacaacatgatgttcttacgaatgaagagataacacttattaatatgttaacggcttgtgagcttatagttgtgtcagccttgcaaagagaagaaagtattggcgggcattaccggagtgattatccagatagaaatataggaaagaaagagattgttcgagtaaagagaaaattacaacttgtgtgatgaggggaagagaggctttatgaacacgataaaagttaaagaagcattaaaccgattttttttagaagatataggagaaagagatgtaacatctcagcttatttttccagataacttgctttcgaaaggaacgtttcttgcgaaggatacaggggtctttgcaggatgtttagtaattgaatcaggatttaaattaattgatgagagaattgaaatagagcttcataaaaaagatggggatcttgtagaaaaaggagaaattattgcaacagtgcaaggtccaatcgcatcgttattaacagcagagcgcgttatattaaatgttattcagcgtatgagcggaatagcgacgatgacgcgtaaagcggttcttgctttagatagcagtcatactcgcatttgtgatacacgaaaaacgatgccaggactacgtatgtttgataagtatggagtcgtgtgcggcggtggatttaatcatcgcttcggtttatatgatggtgtcatgattaaagacaatcatattgcgtttgctggttctattacaaaagctgttacatcagtgaaagaaaagttaggacatatggtgaaagtagaagtagaaacagaaactgaggaacaggtgagagaggctgttgctgctggtgcggatattattatgttcgataatcgtacgccagatgaaatccgggagttttcaaaaattgtaccaagcgctatcgttacagaagcttcagggggcattacaattaaagatttatcaaaatacggaaaaacaggggtagattatatttcacttggagcgttaacacattcagtgaaagcacttgatattagtttcaatattgaagagtaaggaaagtggcttagagggggagaaacgtatatgagtattttagaacaagtacagtcaattgaaacgatgttaccagagcgttattacacgatgtcaacggaagatatggaaaagcgtgttcgtgaaattaaagagaaaatggggaaaatgttattcattccagggcatcattatcaaaaagatgaagtggtacaattttcagatgcagcaggggattcacttcagcttgcgcaagttgcagcgagcaataaagatgcaaaatatattgtgttttgcggggtgcactttatggcggaaacagcagatatgttaactacagatgatcaagttgtcatcttaccagatatgcgtgcaggttgttcgatggcggatatggcagatattgaacaaacagaaagagcatggaaagagctcacgaaattatttggagatacgatgattccgttaacatatgtgaactctacagctgcaattaaagcgttttgtggtcgtaacggaggagcaacagtaacttcttctaatgcaaagcaaatggtatcttgggcgtttactcaaaaagaacgtctcgtctttttaccagaccaacatttagggagaaatacagcgcacaatctaggtatcccgttagataaaatggcagtatgggacccacacacagattcattagagtacgatggggatatagaagaaattcaagtgattttatggaaaggacattgttctgttcatcaaaattttacagtgaagaatattgagagtgtacgaaaaaatcattctaatatgaatattattgtacatccagaatgttgctatgaagttgtagctgcttcagattatgcaggctcaacgaaatatattattgatatgattgaatcagcgccatctagtagcaaatgggcgattggtacagaaatgaatttagtaaatcgaattattaagcaacatccagataaagaaattgtttcgcttaatccatttatgtgtccgtgcttaacgatgaatcgaattgatctgcctcacttattatggacacttgaaacgatagaaagaggagaagaaattaacgttattagcgtagacaaacaagtaacggcagaagcagttcttgcattaaatcgtatgttagagcgtgtgtaaagcaacggtattcccgttgctttttttcatacatataatcataacgagaacgaaatgggcatacattgttttgaagaaatcattgtggttctttatgcttattccacttcgaatgatattgaaaatcgaagaagtgataaaagtgaaaagaagttaatgttatttagaaagagttacttcaagagatttgttacttatagataagttatacaggagggggaaaatttgaaaattcatatcgtgcaaaaaggggataccctttggaaaattgcgaaaaagtacggagtggattttgacacgttgaaaaaaacaaatacacaacttagtaatccagatttaatcatgccaggtatgaaaattaaagtgccatcaaagagtgttcacatgaaacaacaggctggagcaggttcagcgcctccaaagcaatacgtaaaagaagtgcagcaaaaagaatttgcagcaacaccaactccgcttggaatagaagatgaggaagaagttacgtatcaatcagcaccaattacacagcagccagctatgcaacaaacacaaaaagaagtgcaagtaaaaccgcagaaagagctgcaagtaaagccacaaaaagaagtacaggtgaaaccacagaaggagatgcaggtaaagccgcaaaaagaagtacaggtgaaaccgcaaaaagaggtgcaaaaagaacagccaattcaaaaagaaaaaccgtctgttattcaaaaaccacctgtgatagaaaaacaaaaaccggcggaaaaagaaaacacgaagttttcggtaaatgtattaccgcagccgccacaaccaccaataaaaccgaaaaaagaatataaaatttcagatgtaataaaaaaaggaagcgagttaattgctcctcaaattagtaaaatgaaacctaacaatatcatttctccgcaaacgaaaaaaaataatataatatcgccgcaagtgaaaaaagaaaatgtagggaatatagtgtcgccgcaagtgaaaaaagaaaatgtagggaatatagtgtcgccgcaagtgaagaaagagaatgtagggaatatagtgtcaccacaagtgaaaaaagaaaatgtaggaaatatagtgtcgccgcaagtgaaaaaagaaaatgtagggaatatagtgtcaccacaagtgaagaaagagaatgtaggaaatatagtgtcaccacaagtgaagaaagagaatgtaggaaatatagtatcgccaaatgtatcgaaagaaaatgtagttattccacaagtcataccgccaaatattcaaatgccaaatataatgccaatcatggataacaaccaaccaccgaatataatgccaattatggataacaatcaaatgccgaatatgatgccaattatggataacaatcaaccaccgaatatgatgccaatcatggataacaatcaaatgccgaatatgatgccaattatggataacaatcaaatgccgaatataatgccaattatggataataaccaaatgccgaatatgatgccaatcatggataacaatcaaatgccgaatatgatgccaattatggataacaatcaaatgccgaatatgatgccaatcatggataacaatcaaatgccgaatataatgccaattatggataacaatcaaatgccgaatatgatgccgagtatggataacaatcaaccaccaaatatgatgccctatcaaatgcccatgatgccgccgaatccgtattatcaacaaccaaatccatatcaaatgccatatcagcaaggagcgccgtttggaccgcaacatacgtctatgccaaacccgaatatgatgccaatggataataacatgccgccgcttgtgcagggtgaggaagattgtggatgcggaggagaaagtagactatatagtccacaaccaggcggtccgcaatatgcgaatcctttatattatcaaccaactcagtctgcatatgcaccacagccaggaacgatgtattatcaaccagatccaccaaatgtatttggagagcccgtttcagaagaagaggacgaagaagaagtttaaaaaggcgggagtattcccgccttttttgcattcctgttaattaagaaaaggcagtttttttatgaagtgctagaaaattcccagtgaaatattaacagtgtaaaaaccttctctgttactcatcataagagggagcttttcagtagagaagctcattctaacagagggggtttttgtattgaatacgaaagtaaaagtgattgctgcttctttgttagttactagtgcattagctgcatgtggtacaccaaaaaacaatgcaatggatggacgtaactacaattacgagcgtacatcttataatgatacacaccagtatcgtgataatgtgacgcgtaatgatcgttatacagattatgtaacatatagaaatggtcgtaacgatacaggatacaattattaccgtgatgtaaattacaatggacaaattgctaatccgcatccaactcgtaatattacaatgaacaattcatacattaacaatgatggtaaaacagctgaaagaataacaaatcgtgtgaaacgtatgaataacgtagaccgtgtgtctacagttgtatatggaaacgatgtagcgattgcggtaaaaccacgtaacacagtgacaaatgaaacggcgatggcgaacgaaattcgtcaagctgttgcaaatgaagttggaaacagaaacgtatatgtttctgtaagaaatgatatgtttactcgtgtcgatgcaatgagtacgcgtctacgtaacggtacagttacaaacgattttaatcgtgatataggaaatatgttcagagacattcgttacggtttaactggtacagtgcgatagcaaaacaaaagaggaagggggagcccttcctctttattcattttcgtcttgtaaacgacgttttttaataaaataactaacggaataagaacctaaaaagcatatgaagagaataccacctgttaaaatagcttcaaatagggggctttctggactgaaaatgatataaataatagccataacgattcctacaataagagagcgtaaaacaattttgtaataaggagttaattttatctccttttcactttcttctacatcaattgaaacacttaactgtaaataactaaggattatactcgtaagaataaatactagccataatggagatttcgtaatttgatctattccttcagtgaatccgatatagcctaaaataccgattataccaagtgattgaaaaagaaaagcaatacgtacgttttttaacgtttgcagaatgagacgttcatcctttatttttttcacactacccatctcctgtttattatgatttcgctgttacattaattgtaacatatacattacatttatcaatttataatttacatataatttgtttagatgaaagaggaaataaaatatttttataaacatgttgcacttatactttattaatgttatattagcaaagcgatgagctaatttacgtaagacgagagatatgcttaagtgctaaacacgcgaatgtggtcgcctggtctctcgccgtaaacgcatcaagacgcctgctttgcaggcgtctttcattttatataaaagtaaatgatacatgcagatgaggtgaatccttatctgcattttttatattttcgaaagaaatataatatggataaaacccccatttccggaaaaactactaatgaaagtatgatcttgcctaaaagaggtgaacggaaatgaaatggatactgattgcgatgcaagctttcgttataatgttttgtttcgtttatgaaacgaatgtgaaggcggaagggccagtaccagaagtgacgaaaaaagaacctgaggttacaattttattagagcgtatgtatgttgatggcgaagtaagcgaagaaatacttacagaaaaagtgacggatttagaaaagtttttacagcagtataaagaatggcagctcgttgatcgtgatgatgtacaaattgtattgcaaaagaaagttgatgatatttctccgttattgaaaacgagcgggtattttggtgtttcagaggaagggatattacaaattttcaaaggtgtgccaaaaaatgataatgcgatccattctttctttcaaattgatatgaaaaagcttgagagctatgaacgtgcgaaattgaaacgtggcattcgtattaaatcaaaagaaggttttgtgaagacgattgaaaaaatgaagcaatacgcagttcaaagtaagaaaaaaagcagctcatggtgagctgctttttttcttatttatttttagctaaaatttcttttgcgatttcatcaattagcatatcttttccgattggattgaatgctttcgtattgaagacttcatttaatacttcatatacgtgattatttttaactgctttattgtctttccaaacggcactgtttttgtagtcttcgtaaactttatcagcttcgccgccgaagtttacaataaacatttggtcaggctggaatgcaactagaccttctagtgatacttgcgccatcgtttgttttaaatccgtaccttttgttgctggaagttttaagtcattaaagatgatgtcaccgtatccgaagctaccgtatacacggaagttttgtggtgtaactgcaacgaacataaagttctcatcttttgttttctctttaatttttttagataaagagtctgctttcttatcgtagtctgcaatccatttgtctgctttcttctcttcgtcaaatagcttacctacttctttaaacttaccacgccagtcttctaagtttgtttctagaacaactgtaggtgcaaccttttctagttgatcataaatttttaattgccggttgtttaaaataattaagtctggttttaaagcagtaacagcttctaaatcaactttaggtgcccagtaccaacctactgcttttactccatctaacttgtctgttaagtgattttggattttatctttatatgtatttgctgtaccaacaggtttatgtccaagaagtaatagttcttctgttgatccagataagtcaacaattctctttggatttactggaattgtagcttcacctttagcatgttttacaacttttgttttcggttgttcttttgctttcgattcttctttttgagaagaacagccaacgatagaaagaacaacaagcataatagtaaataaaataaatagcttacgtttcatcctgatgtaacccctttaattagtattgataatcattatcgacttctgtatattaaggtgctttaacctttctgtcaatggaaaataacagaagtttcaagtggagaacatttgttggggcagtctcgcttttctatcattaaatatgttaaaatggaatacatgatttaagagggagagatcgtattttgtttgaatatgttacaggttacgtggagtatgtagggccggaatatgtcgtaattgatcataatggaattggttatcaaattttcacaccaaatccgtatgtatttcaaagaagtaagcaagaaatccgtgtctatacatatcattatgtgagagaagatattatggcactttacggttttaaaacacgtgaagagcgtttattatttacaaagttgttaggcgtgtctggcattgggccaaaaggcgctcttgcaattttagcttctggtcaaacaggacaggtcgttcaagcgattgagcatgaagatgagaagtttttagtgaaattcccaggcgtcggaaagaaaacagcacgccaaatgattttagatttaaaaggaaaactagcagatgtcgtaccagatgcatttgttgatttattctcagacacagaacgttttgatgagaataaaggttcatcagctgagcttgatgaggcactggaagctctgcgcgcacttggatacgcagaacgcgaagtttctcgtgttgtaccagagttattaaaagaagcattaacgacggatcagtatattaaaaaggcacttagtcttttactaaatggtaagaggtgagtataatggacgaacgtctcctttcaggggaatctgcatatgaagatgcggatttagaatattcattacggccacagacgctccgtcagtatattggccaagataaagcgaaacataatttagaagtatttattgaagcggcgaaaatgcgtgaagaaacgttagatcacgtgcttttatatggaccaccaggtcttggtaaaacgacgcttgcgaatattattgccaatgagatgggcgttaatgttagaacaacttcaggtcccgcaattgaaagaccaggagatttagctgctgtattaacagcgcttcagccaggtgatgtattatttattgatgaaattcatcgtttgcatagatcaattgaagaagtattgtatcctgcgatggaagacttttgccttgatattgtaattggaaaagggccttcagcacgttctgtacgcctagatttaccgccatttacattagttggagcaacgacacgtgctggagcattatcggcaccgcttcgtgaccgcttcggtgtactttcaaggttagagtactacacagtagatcagctttctgcgattgttgaacgtacagcagaagtatttgaagttgaaatcgattcgttagctgcattagaaattgcaagacgtgctcgtggtacacctcgtattgcgaatcgtcttttaagacgtgtacgtgatttcgcacaagttcgtggtaatggaacggttacgatggaaattacacaaatggcattagagctactgcaagtagataaattaggtctagatcatattgatcataaattactgcttggtattattgagaaattccgtggcggtccagttggattagaaacggtttcagcaacaattggagaagaatctcatacgattgaagatgtgtatgagccgtatttattacaaattggctttttacaacgaacgccgaggggccgaattgtaacgccgcttgcgtatgaacatttcgaaatggagataccaaaagtatgacggagatgccaaagctgcttattacagccgggatcttactcatcgttgttggattagcttggaagttcattggaaggcttccaggcgatatttttgtgaaaaaaggaaacgttaccttttattttcctatcattacatgtattgtgttaagtattgtattatcttttattatgtatataataaatcgatttaaataagaaataggtggatatagctatggatataaatctgtttgattttcatttaccagaagaacttattgcacaagtcccgttagaagagcgtgaaacatcaagattaatggtgttagaccgtgaaacaggtgatattgagcataaacattttacggacattctttcttacttacatgagggggattgcttagttttaaatgaaacgaaagttatgcctgctcgtttgcacggtgtgaaagaagatacaggcgcgcacattgaagtacttcttttaaaacaagaagaaggtgataagtgggaaacgcttgtaaagccagcgaaacgtgtaaaagaaggaactgttatctcttttggcgaagggaaattaaaagcaacttgcacaggaactgcagatcaaggtggacgtcagcttgaattttcatatgacggcatcttctatgaaattttagatgaacttggggaaatgccacttcctccatatattaaagagacgctagaagatcgcgatcgctatcaaacagtatatgcgaaagaaatcggttcagcagcagcgccgactgcgggacttcactttacagaagagttacttgagaagttaaagcaaaaaggcgttcagttagcattcattacacttcacgtaggacttggaacatttagaccagtttctgcagacacgattgaagaacaccatatgcacgcagaatattatcatatgtctgaagagacagcggcattattaaatcgtgtgaaagagaatggtggacgtattattactgtaggtacgacatcaactcgtacgttagaaacaattgcaacagatcatgaaggtaagctttgcgccgcttctggatggacagatattttcatgtatccgggatatgaatttaaagcaattgatggtttaattacaaacttccatttaccgaaatcaacattaattatgcttgtaagtgcatttgcaaatagagataatgtacttcatgcttataatgaagcagtaaaagaaaaatatcgtttctttagcttcggtgatgcaatgtttgttgcatctcacgctaaaatgagaaacaaataaaaggagtaagttatgacagcaattcgttatgaatttattaagacatgtaaacaaacgggtgcccgtttaggtcgtgtgcatacgccgcacggttcatttgatacaccaacatttatgccagttggtacacttgcaacagttaagacaatgtcaccagaagaattaaaagcaatggattctggcattattttaagtaatacgtatcatttatggctacgtccaggtcatgaaattattcgtgaagcaggcggcttgcataaatttatgaactgggatcgtgcaatcttaacagactctggtggtttccaagtattcagtttaagtgacttccgtcgtattgaagaggaaggcgttcacttccgcaatcacttaaatggagataaattattcttatcaccagaaaaagcgatggaaatccaaaatgcattaggttcagatattatgatggcatttgatgagtgtccaccattcccagctacttttgaatatatgaagaaatctgtagagcgtacgagccgctgggcagaacgttgcttaaaagcgcatgaacgtccgcaagatcaaggtttattcggtattgtacaggggggagagtacgaagagcttcgtcgtcaaagtgcgaaagatcttgtttcaatggacttccctggttacgctgtaggtggtttatctgtaggcgaaccgaaagatattatgaaccgtgtacttgagtttacaacaccacttcttccagataataagcctcgttacttaatgggtgtaggttctcctgactcgttaatcgatggcgcaattcgtggtattgatatgtttgactgcgtacttccaactcgtatcgctcgaaatggtacatgtatgacaagtgaaggtcgcctcgttgtaaaaaatgcgaaattcgcaagagacttcggtccgcttgatccaaactgtgattgctacacatgtaaaaactactctcgtgcgtacattcgtcacttaatgaaatgtgatgaaacgttcggaattcgtttaacgtcttatcacaaccttcattttctgttaaacttaatggagcaggtgagacaagctattcgtgaagaccgtcttggcgatttccgcgaagagttctttgaacagtatggctttaataaaccgaatgctaaaaacttctaatacataatttaaaaggaggaacaaaagatgaatgcaggtatgatgaatatcgttatgatcgttgcgatgtttgcgattttctatttcttattaattcgcccgcaacaaaaacgtcaaaaagcagttgctcaaatgcaaagtgagttagcaaaaggtgatgctatcgtaacaatcggtggtttacacggtacaatcgaatcagtagatgagacgaaaattgttattaaatctggtggttcacacttaacgttcgatcgcaatgcgattcgtgaagttgtgaaaaactaatttggaaggccctgcatgaaatatgcagggccttttttagttactttgctttgacatatttacaccgaaaataccaccgagtgtactcgcccccattaatgctaattgataaagtaattgtgagttcgataaagtttgagaaaagcctaaatagttaactagaaaaacgagtatagtgaacgtgagacctgttgtgagacctactagccaaccttttccttgagcctttttgccggcagtaaatccagacataagcatagataaaagagcgagtataaaaatagtaacggttaatgtcccttcgtttatattcgtaaactttaataaaagagccataatcatactagtaatagatgcgagaattagtagtgtaacaataccgaagccaattgcagttgataattttttcgttccatccatttatgcattccccctttttaatacaagcatattttccttttgtctaagttagactagtttcttttttataggggagtctatacgtaaaaaaggagatgtagaaatggaatggatatcaataattggacggacaatgcttttgtatatcatcatcttaattatttttcgtcttatgggtaaacgtgagataggagagctaagtgtattagatttagtcgtatttattatgcttggagaaatggctgtagtggcaattgaaaataccgataaatcactttggcatcaattagttccgatgacttttcttatgtgcatccaaattattttgtcagtcatttccctaaagtatcaacgctttcggcatttaatagaaggtgagccggctattcttgtaaacgcgggaaagattgatgaaaagaagatgagaaagcaacgttataatatagatgatttaatgatgcaattaagggaacaaggagttggagatattcgggatgtagaatatgctattttggaaccgtctgggaagttatctgtctttcaaaaacaaaaaaataaacaagatacattgcagtttacgcttcctcttattattgatggagaaattcaatctagtcatttacaaatgattgaacatacagatgcatggcttattgagaaattaaaaaacttaggttataacgatgtaacacaaattttatactgtagttttcaaaacggaaaattttttgttgatgtaaaagaaaattagagacttattctttgaaagagtaagaatgattagtgtaactaataatcagtggagattaccccactgattaaagtttcaccttatttcaaaaatgaaagtttacgaatgatagggagacgacttaactcttcttttcgaatgagtttgaaagtgaagagaagtacgatataaacaattgttgttaaagtgatttcccataatgtttgtatgccaagggcatgagagaaaataatatatttatgaagataaaaaccgaaggcgcctgcgataccgatggcaagtccgccgaaaatatagtcttttgcgtaaatggtaaatgtaatcttttttaaaacagtagcgtagtgaagaaatgttactgttacaatatttgctgcaatagcgagagcaacccccatcatttgaaattctggcctggatgctagtacaaaaataacgattaatttcacgatggctccaataaatgtattcatcattgcagctcttgctaagtttaaagcttgcaaaacagaggtaagtggactttggaaataatgaaataaaaagcaaggcgcaagaagttgaatgaatgctgttgcgctgtctgatccatacataagagttaaaacaggagaagcgaatacgtataatataacgacagaccatccgccggtaattaatgaaattcgaagtgcttgttgtaaacggtgctccactaatttatgttgtctttttgccattgcttcactaatagaagggacgagcgctgtagagagagcgtatgtaataaaggcgggtagtgatagaagcgggaatgcataaccgtttaatataccgtattgctgggttgcaacagaagcagcgacaccagcgattgctaagctttgcataacgacaataggttcaaaaaaatatgaaacggagccgattaaacgacttcctgtagttggaagggcaatatccatcagagaataaaatgtccctttgctttcctttacagtagtgaaaaatccagagcgtattgataaatgtttttctcgctgaaataacgtgagtaaaaataataacgatgcaacttcaccgagaacagctgataacatagcgccggctgcagcgtattctatgccgtaaggtaaaaataattgaatgcatatagcgataatggtaatgcggacgacttgttctagaacttgcgcataagcgctaggtttcatgttttgtttcccttgaaaataaccacgcaaaacagaagaaacagcaataacaggaacaacgggcaaaatggccattaatggatagtacgttctttcgtcggttaataatgtttttgctaaaataggtgtgaggaacataattccgattgttaaaatgatactaataacggatgtaacagctagtgatacggttaatatttttttaactctttgtttatcgttcacagcttccgcttctgctacaaattttgcgattgcgacaggaagaccaatttgtgtcaatgtaattgctaaaatgaatgtaggaacggccatcatataaagaccaacgccttcttctcccaaaatacgtgccattactatgcggttgataaagccgagtatttttgtaataaagccggctatcattaaaataaatgcgccttttaaaaagctttgtctcgtcatgttcttctcctaccttctcaaaatcaatggaatgatttacaataatttatatgcacgtacgagacaagaatgacaagcatttaagagagtgaaatatgatagtgctcttgaaagtagttattgctgtccattagagcgggaataaaagcgacttttcgtgcgaaataagaaggagatgttatagatgttagatagagaggctttggtagaatcataccgcggacagttacaagtcgttttagaaagtaaagtagaagagtttcaaatgttcggctacgacagagtgacagatgatgacatttggaagtttcttaaagtgaaaaagtggaagaagatagacagcgatgttagattgtatgaattagttaatgacgtattaacagtaagtgctaatgaatatatgacatatttaactgttgaagcatatcaagcgccactttggtcatttgatgaatatgaaaataaataaccgactgcaattggtttgttcttccttttgcagtataatgataggtattgataatcaggaaataattatgtctaagatcatatataaaggaggtagtgaagagagaaaacaaataatgaaagtgcaggtatcgtgaaaacgtaccggcacagctagtgatgagctagcaaaattatagaaaggaagtctactaactagacgtatacacacgtgtaaaagtgaatcgtaagagatttatttaaagtgttagtagcggaaagagggtacatatggcaaagcgtggtacgagaattgccgcctttttcctcatcgttttattaatcggtggagtaattggtgcggcaggaaaagacatagcaaaaggaattagtctaggactagaccttcgcggtggttttgaaattctgtatgaagtaaaaccagccaaaaaaggggacaaaatcgatcgagacgtacttgtaagtacagtaggtgctcttgagaatcgtgtcaatgttctcggtgtaagtgagccgaacattcaaatcgaagggcaagatcgaattcgtgtacagcttgctggtgtacaagatcagcaaaaagcacgtgaaatgttatcaacacaagcgaaattaacattccgtgatgtagatgataatcttcttatggacggaacggatttaaaaggcggcggagcgaagcaaacatttgatgagcaaggccgtgcgagcgtaggtcttacactaaagagcgctgaaaaattccgtgaagtaactgaaaaaatttcaaaaatgccaccaccaacgaatttaatggtaatttggcttgattttgaagaaggaaaagattcgtacaaagcagaatctgcaaaaccgaatccgaagttcttatcagcagcaacagtaaaccaagtatttaaccaagctgaagtatctatcgtaggtggaaacttcacagttgaaagtgcgaaacaactttcatctttattaaatgcaggtgcacttcctgttgatttaaaagaaatgtattcaacatctgttggagcgaagtttggtcaacaagcgttagagcaaacgattttcgctagtgcgattggtatcgctcttattttcttatttatgcttgtattctaccgtttaccaggacttgtagcggttattatgttaggtttatacgttttcgttacattacttgtctttaactggatgcatgcagttcttacgttgccaggtattgcggcgttagtgctcggagtaggtatcgcagttgatgcgaatattattacgtacgagagactgaaagaagagttgaaaattggtaagtccatgatgtcggcattccgcgctggtaaccatcgttcattagcaacaattctagatgcaaacgttacaactcttgcggcagctggtgtgttattcgtttatggtaatagctctgtaaaaggattcgcaacaagtttaatcgtaagtattttagttggttttattacgaacgtattcggtactcgtttcttactaggtttacttgtaaagagccgttactttgataaaaaaccaggatattttggtgtgaaacaaaaggatattattccattaacaaaaggtgtagtacatccgccaacgagatttgatcgtattaacttcgtaaatatcggtcataaattccttatcttctcgattgtagttgtaattgcgggtgcaattatcttaccaattttcaaattgaatcttggtattgactttgcaagtggtacacgtattgacttgcaatcaaaacaagccgttacggtgtctgatgttcataaagattttaaagaactgaacattgatgtgaaggaagaaaatattgtaccgactggagatgacaataaaggtttcgcagttcgtacattaggtgttttatcaaaagatgaaattgcgaaaacaaaaacattcttccacgataaatatggtacagatccaaacataagtacagtttcaccgacaatcggtaaagaaattgcacgaaatgcatttatcgctgtactgattgcttctgcggttatcattttatacgtaagtattcgattccgatttacgtatgcgttatctgcagtacttgcattattacatgacgctttcgttatggttgttatgtttagtattttccaactagaggtagacttaacgtttatcgctgcagtactaacaatcatcggttattctattaatgactcgattgttacatttgatagaaaccgtgaattatacaaacagaaaaaacgagtgcgcgatataaaagatctagaagaaatcgtaaatgcaagtattcgccaaacgcttggtcgctcgattaataccgtattaacagtgttattcccagtaattgcactgcttatcttcggtagtgagtcactacgtaacttctcgtttgcgttacttgttggattaattgtaggtacgtactcttctgttttcgttgcctctcaaatttggttaatgcttgaaaaccgtcgtttgaaaaagggaaaaaacaagaagaaggttgagaaagtagaatctgaaccgcaagtatagaaaagatgatgtctctttatgaggcatctcttttttcgtttgtggatacaataagatagcaactttttaacagaaagaagatggaagaaagtggtggtgttatcgctgtttttgttaaaataaaaagataggttaagaaaagaagggattttaattatggaaaaagatgaacgttttaaacaggccgagtttggtgccattgtcgggatcgttggtaatattatattagcgattgtaaaggcggtaattggttatattgggaacagtaaagcgctattagcggatgccgtgcattctgcatcagatgtaattggttcgctagctgtactttttggattgcgagcggcaaagcagccacctgatgaagatcatccgtatggtcatggtaaagcggaatcgatttcagcgattattgttgcggtattattatttattgtgggacttgaaatcgcgatttcatctataaaagctttttcgcaagaactagaaccgccgaaaggaattacgatatttgctgttgttctttcaatcgtcgtgaaagaaggaatgtttcaatataaattccgattagggaaaagggtaaatagtgatgcaattattgcaaatgcatatgagcaccgttcggatgtgttttcttcaattgcagctttaatcggtatttgtgcagctatactcggtggtaagcttggtatagactggcttgtatatgctgatccgattgcaggattagttgtttcgcttcttgttgtaaaaatggcatggagcattggagcggaagcaattcatgcaacgcttgaccatgttcttcatgaggaggatgttattccgcttagagaggccgttcttcaagtagatggtgtgaaaaaaattggttctttatatgcacgggagcatggtcattatgttattgtcgatattaaagtgtctgtagatccatacattaccgtagaagaaggacaccgtattggaaaacatgtgaaagaaatacttatgaaacaagataatgtacaaaatgtattcgtacatataaatccgtattctccaaattaaacatcattaacattttagtatatagatattgcatcgtagtttgcattatattgtcaccccttaatctgtcttgtataatgaacaggttaaggggtgatttcgtgttacaaccgaagacgcgttggaaagaaaaagaatataatgacgagcgagtgagtgaattagcaagtaaattacagttatcgccacttgtcgtttcattattcctcggtagaggactagatacagaagataagattttagattttttaaatacagaaaatcaagaatttcatgatccatttttattagaaggaatggatagaacggtagaacgtgtaaataaggcgattcaaaatggagagcaaatattaatatttggtgattacgatgcggacggagtaagtagtacgacggttttatatcttgctcttcaagaattaggtgcagaagtagaattttacattccaaatcgttttacagaagggtatggaccgaacgaagaagcatttcgttgggcgcatagtgcaggtttctcactgattattactgtcgacactggcatcgcagcagtacatgaagcgaatgtagcgaaagagcttggaatagatctaattattacagatcaccatgagccaccgccagaattgccagaagcgcttgcgattatacatccgaaattagaaggtggcgtatatccgtttcactatttagctggtgtaggtgttgcgtttaaagttgcgcatgcactattaggccgtgtaccagaacatttattagagattgcagtaatcggtacagtagccgatttagtatcacttcatggtgaaaataggttgctagtgaaacgcggtttaaaacatatgcgtatgacgagaaatattggtttgaaggcattgtttaaagttgctaacgtttcgcaaagtgaaattacagaagagagtattggcttctcaattgcacctcgtattaatgcggttgggcgtttagaagatgctgcgccggctgtacaccttttattatcagatgatccagaggaagcgaaagagttggccgaagaaattgatgagctgaacaaactgcgaaaagatattgtaaagcaaattacagaagaagctatcgctgaagttgaaaataaattcccgccagaagaaaacaaagtattagtacttgcaaaagaaggctggaacccaggggtaattggaattgttgcttctaaattagttgaacgtttttatcgtccgacgattgtattaagcatcgatcctataaaagaaacagcaaaaggctcagcacgtagtattgcaggatttgatttgtttgcaaacttatcagattgtagagagttattgccacacttcggagggcatccgatggcagcgggaatgacgctacatatgaatgatgtagatgaattacgtcgccgattaaatgaacaagcagatgcgattttaacagaagaagattttattccaattacagcagttgatgttttttgcaaagtagaggatgtaacgctagcggcaattgaagatatgcaaaaactagccccgtttggtattggaaatccgaaaccacgtattgcagtaaaagatgcagagttagaaagcattcgcgcaatcggatcagatggttctcatttaaaaatggctcttcgtgatggacaagcaacactggatacaattggatttggttttggtgcatatgctaaagaaatctctccagttgcaaaagtatctgtaataggagaagcatccatcaatgaatggaataattttaagaagccacaactaatggtacaagatattgctgtagaggcgtggcaattatttgattggcgtagtatgcgtaatgcagaagcaaatttagcagaacttccgaaagaaaaaataacaatggtgtatttttctgaagaggtattgaataaattttctttagagagctataaagaaaagctcatgcatgcttcagaagtaacgcatttagatgatcaatatatcgtgttacttgatttaccaaaaggaaccgatgaattacgtgagttatttaaggcaggattcccagcgcgaatttatacgctattttatcaagagaataaccacttatttagtacagttcctacgagagaacactttaaatggtattattctttcttaaaccaaaaaacaccattttctttaagacaatatggagaacaactatgtcgtcataaaggttggtcaaaagatacagtaaattttatgacacaggtgttttttgagttagaatttgttacaataaaagatggcgtcatttttatggcagacaaaaaacaaaagcgtgatttaattgaatcgaacacatatcgtgagaaaatgaaccacttacaattagaaaaagaattggtttatagcacatatcagcaactatatacatggtttgaaacgattcgtaatcataaagaagtagaacagttagggtaaaggatttgtatttacaaaccttttagatctgaggaggattcagaaatatggatttcaagcaacatatcgcaattgtaccggattatccgaaagaaggtattgtgtttaaagacattacacctttaatgaatgacggtaaagcatacaaagcagcaacagatgcaatcgttgaatacgcaaaagaaagagatatcgatgttgtagtaggaccagaagctcgtggtttcattatcggttgcccagtttcttatgcgttagaagtaggatttgcgccagttcgtaaattaggaaaattaccacgtgaagtaattacagttgactacggtaaagaatatggtaaagatgttttaacaatccataaagatgcaattaagccaggtcaacgcgtattaattacagatgacctattagctacaggtggaactatcgaagcgacaattaagctagttgaagaacttggcggagttgtagcagggattgcattcttagtagagcttacttacttagatggtcgtaaaatgttagatggttacgatgtattagtattagaaaaatactaatcactatataggtaaaactacggtgataaaaagtacccgtgaatctcttggagaggagcgggtacttttgtataattgaacaaaaaatcatggtgaaatgtcagtaaaatcttttccttttcacaattcacaatcattgggttataatgatagaatataatttattctattaaataaagataaagtcaattttcaataaaaggtgattcgatggcaaatgagcaggtactaacagctgaacaggtactcgagaaagcaagtcaatatttagtggatgaagatattgagctagtagcacgtgcctatgaatatgcacgcgatgcgcatagcgaacaatacagaaaatcgggtgaaccgtatattattcatccaattcaagttgcaggtattttagttgatttacacatggatccagctacggtatcagcaggtttcttacatgatgtagtggaagatacagagattacgttagaagatattgaacgggaatttaacaaagaaattgctatgcttgttgatggtgttacgaagcttgggaagatcaaatataaatctcacgaacaacaacaagcagaaaaccatcgcaaaatgtttattgcaatggctcaagatattcgagttattttaattaaactagctgatcgtcttcataacatgcgtacattgaaacatttgcctcaagagaagcagcgtcgcatagcgaatgaaacgctagaaatctttgcacctttagcacatagactcggaattagtactattaaatgggagctagaggatacgtcacttcgctatttaaatccacaacaatattatcgtattgtaaatttaatgaagcgtaaacgtgcagaacgtgaagaatacttagacgaagtaatgactggtattcgtgagaaattaaaagaagttgcaattcaacctgagatctctggaagaccgaaacatatttacagtatttatcgtaaaatggcactgcaaaataaacagttcaatgaaatttacgatttattagctgtacgtgtcgttgtaaatagtattaaagattgttatgcagtgcttggaattattcatacgtgctggaagccgatgccaggtcgttttaaagattatattgcaatgccaaaagcaaatctatatcaatctcttcatacgactgtaattggaccgaaaggtgatccacttgaagtgcaaattcgtacgaaagaaatgcacgaaattgcagaattcgggatcgcggcacactgggcatacaaagaaggaaaaacagcagaaacaacaggtacattagagaagaaactcacgtggttccgtcaaatattagaatggcaaaatgaagcttctaatgcagaagaatttatggagtcattaaaaattgatttattctctgacatggtattcgtctttacaccgaaaggcgatgtaatggaattaccacttggatcggttccaattgatttcgcgtatcgtgtccattcggaaattgggaataaaacaattggtgcaaaagtaaacgggaaaatggtgacgctggattataaattaaaaaccggcgatatcattgaaattttaacgtcgaaacattcatatggcccaagtcaagattgggtaaaacttgctcaaacatctcatgcgaaaaataaaattcgtcaattctttaagaaacaacgtagagacgaaaatattgaaaaaggccgtgaacttgttgaaaaggaagtacgtggtctagagtatgagatgaaagaagtattagcgcctgataacttaaaacgcgtcgcggagaaatttaactttgcaaatgaagaagatatgtttgcagcagttggatatagcggaattacagcttcgcaaattgttacgcgactaacggacaagttccgcaagcaacgcgaagaagaagaaattgttgaagtcaaagaagttcgtaaaccgatgaaaattcgaaaatgggattctggtgtaaaggtaagcggtgctgataatttattaatccgtttatcgaaatgctgtaacccagttccgggtgatgatatcgttgggtatattacgaaaggccgaggtgtatcgattcatcgccgtgattgtgtaaatgttcatacagaagaagcgatagaacgtttattagaagttgagtgggaaggtagccctgaaaaagaaatagagtataacgttgatattgaaatttcaggttacgatcgccgcggtttattaaatgaagtactgcaagctgttacagagacgaaaacatacatttcagctgtttctggtagaagtgaccgtaataagatggcaacaattaatatgtcaatctcgattcgtaacttacaacacttgaaaaaagtagtagaacgcattaaacgcgttccagaaatttatgcagtacgacgcatgatgcattaatagggagtgtagaaagatgagagttgttttacaacgatcaaagaaagcgtctgtcacagtagacggtgagatcgtaggacaaattccgttcggtttaacattactagttggcattacgcacgaagatacagaaaaagatgcaacttacattgcggaaaaaattgcaaacttacgtatttttgaagatgagagcggaaagatgaatcattctgtacttgatgtagaaggacaagttctatctatttcgcaattcacattatacggagattgccgcaagggaagacgtccaaactttatggatgctgcgaaacctgattatgcagagcgtttatacgatttctttaatgaagaagttcgtaaacaaggattacatgtggaaacagggaagttcggagcaatgatggatgtttctttaatcaatgatggtccggtgaccttaattgtagaaagtaaatagtgttgataaaaaagagagggttatataatcctctcttttttatacattgttgtatgttttgttcatttatttggaattaatagcagtttcggttatgtataactctcccatcaatatggaacaataaaaagtaaaacatccatattgaatgtgagggatatacgtatgcgtatgaatgaaaaagggcattctgttacaaatggtgcaaatcaactatttaacgtgaattttcatgattttatttcaaaagagcaaaacaatacttcaatggagcttgcttccgagtttgggatttctcttcaagatgtaaagcgtttaaagaagcagattgaacgttcttagagcacttgacaatcctacttaacaaacgtatagtaattttatatttacatatgaatataaccgttgatagagaagagtaaatgagacacacatggaaagagaaggaatgtcttaggctgaaaacatttctgcatgatgactgattgaatgacactctagaggtttcaacttgaacggcatatacgcttagtagggatgaacgcacatttaagcgttattaaaaaagtggaagcatacgtgcttcaattagggtggcaccacgggtataatactctcgtccctactgtttaaacagtagaggcgggagtttttttatttttattaagattaaaacaatttgaggaggaactgaatatgtctattcaaatcccacgcggaacgcaagatattcttccaggcactgttgagttatggcagtatatcgaagggcaagcacgcgaaatttgccgtcgttacaattataaagaaattcgtacaccaatttttgagcacactgagctatttttacgcggtgttggtgatacgacagatatcgtacaaaaagaaatgtactcattccaagatcgtggagagcgcagcttaacattacgtccagaaggtactgcacctgttgtacgttcttatgttgaaaataaaatgtttggtgatgcaacacaaccaacgaaattatactatatcggtcaaatgttccgttatgaaagaccacaagcaggtcgctatcgtcaattcgtacaattcggtatcgaagcaatcggcagtaatgaccctgcaattgatgcagaagtaattgcacttgctgttgaattttaccgcggcatgggcttaaaaaatattaaagttgtattaaacagtttaggtgacgcagcgagccgtcaagcacaccgtgatgcattaatcgcacactttgagccacgtatcggcgaattctgttctgactgtcaatctcgcttagaaaagaatccacttcgaattttagactgtaagaaggaccgtaaccatgaattaatgggaacagcaccatctattacagaatacttaaacgaagattcagcaatatactacgacaaagttcaagaactattaacgatgatgaatgttccgtttgaaaaagatccgaacttagtgcgtggtttagactactaccaacacactgtttttgaaattatgagtgaggcagaaggtttcggtgcgatcactacattaagcggtggtggccgttataacggacttgtacaagaaatcggtggaccagaaatgccaggtatcggttttgcaatgagtattgaacgtttaattatggcgctaaaagctgaaaacattgaattaccacttgaacatagcattgattgttacgttgtggcgcttggcgaaaaagcgaaagaccatgctgcaaaagttgcgttcgatcttcgtaaagctggattgtcagttgaaaaagattatttagatcgcaaaatgaaagcacaatttaaatcagcagatcgtctaaaggcgaaatttgtagctgtattaggagaagatgagctagataaaggcatcattaacttaaaagatatggcaacaggtgaacaagaagaagtagcgttagatgtatttgcttcatacgtagcagagaaattaatatagggggaacttacagtggctgaaagaacacatgcatgtggaaaagtaacagtagaagctgttggacaaacagttcaattaaaaggttgggtacaaaaacgccgtgacttaggtggattaatctttatcgacttacgtgaccgtacaggtatcgtgcaagttgtatttaacccagaaacatcaaaagaagcgttagaagtagcagaaacaattcgtagcgaatacgtattacacgtagaaggtacagttgttgaacgtggtgaaggcgcaattaatgacaatatggcaactggtcgtattgaagtacaagcaacgaaagtaaatgtactaaatgcagcgaaaacaacgccaatcatcattgctgatgatacagatgcatcagaagatgtgcgtttaaaatatcgttatttagacttacgtcgtccagtaatgtttaacacattcaaaatgcgtcatgacgtaacgaaaacaattcgtaacttcttagacacagaagagttcttagaagtagaaacaccaattttaacgaaaagcacgccagaaggagctcgtgactatttagtgccaagtcgtgtacatgatggtgaattctatgcattaccacagtcaccacagttatttaaacagcttcttatggtcggcggatttgagcgttactatcaagtagcacgttgtttccgtgatgaagatttacgtgcggatcgtcaaccggaattcacgcaaatcgatatcgaagcttcattcttaacacaagatgaaattttagatatgatggagcgtatgatgacgaaagttatgaaggatgcaaaaggtgtagaagttagtgcaccattccctcgtatgaaatatgctgatgcaatggctcgctacggttctgataagccagatacacgctttgaaatggaactaacagacttatctgagtttgcagcaggttgtggctttaaagtgtttacaagtgctgtagaaagcggcggacaagtaaaagcaatcaatgcaaaaggtgctgcaagtaaatattctcgtaaagacatcgatgcattaactgaattcgtgaaagtatacggtgcaaaaggtttagcttggcttaaagttgaagaagacggtttaaaaggaccgattgcaaaattcttcggtgaagaagatgcaaatgtgttaatgagcacattagaggctactgctggcgacttattactattcgtagcagataagaagagcgttgttgcagatagcttaggcgcacttcgtttacgtctaggtaaagagcttgagttaattgatgaaagtaaatttaacttcctatgggtaactgattggccacttcttgagtacgatgaagatgcagatcgttacttcgcagctcaccacccattcacaatgccattccgtgaagacgttgagttactagaaacagcaccagaaaaagcacgtgcacaagcatatgaccttgtattaaacggttatgagcttggtggtggctcacttcgtatttacgagcgtgacgtacaagaaaaaatgtttaaagcacttggattctcacaagaagaagcgcaagagcaattcggattcttattagaagcattcgaatacggtacaccaccacacggcggtattgcattaggtttagatcgtcttgttatgctgcttgcaggccgtacgaaccttcgtgatacaattgcattcccgaaaacagcaagcgcaagctgcttattaacagaagctccaagcccagttgcagaagcacagcttgaagagttaaacttaaaattaagcttaaaagaagagaagtaagaatagggtctagatggttatactataaccgtctagactttttttgagaggttgtttaaaaagtccggtttagataactgtcgcatctcatcgttgcttcgccagtccggtgctcgagtagtatttttctacactgcgctcctcctggcttcagcgcctcgatctgctcggttctctgaatcctcttttttaaacgtgtattgaaaggaagtttaaaaagtccggttcagataactgtcgcatctcatcgttgcttcgccagtccggtgctcgagtagtatttttctacactgcgctcctcctggcttcagcgcctcgatctgctcggttctctgaatcctcttttttaaacgtgtattgaaaggaagtttaaaaagtccggttcagataactgtcgcatctcatcgttgcttcgccagtccggtgctcgagtagtatttttctacactgcgctcctcctggcttcagcgcctcgatctgctcggttctctgaatcctcttttttaaacgtgtatttaggaagaaatgaaattctggtctatgttttcattttcgaaatatgtatttttaggaattctataactttttctatacaaatagtcggaaaaacgctagaatacatggtagaccatttttgtaataggagtgtagagctgaatgttacatcaattttcacgtaatgaattagccttcggtaaagaaggacttgaaatattaaaaaatagtacagtcggtattttaggaattggcggcgtaggttcattttcagctgaagcgttagcgcgttctggagtaggacgtctcgtattagttgataaagacgttgtagatattacaaacgtaaaccgtcaaattcacgctttagtatctactgtaggacgttcaaaagtagaattaatgaaagagcgtattgcagacattaatccggaatgtgaagtaattggactagaaatgttttatacagatgaaacatatgaggagttctttaaacacggtttagatttcgtagtggatgcatctgatacgattacgttcaaaatccatttaattaaacaatgtttacgtcgtaaaattaaaattatctcatgtatgggtgcagcaaataaaatggacccaactcgtttccgtattgcggacatttctaaaacacacacagatccgattgcgaaagtcattcgtacgaagcttcgtaaagagggtattaaaaaaggtgtaaaagttgtcttctctgacgaaaacccaatcgtaattcgtgaagaagtacgtaaagaaatcgtaccagacgaaaatgcaaaaattcgtaaagcgaaattaccgccttcatcaaatgcattcgtaccatctgtggcaggcttaattatggcaagtcacgttgtacgtgaacgtattaaaaatgtagaagtgaaacgtgtagggcaagaataaaagaaaagcatatatccattttggatatatgcttttttatatgtattaaagaaatatggatatttgcattactactagttcaaatgtaagtaaggttagtaagtaaaaatcatatttatctgatttataggcggatgtcttttttagactgttaatggtgaaaagagctaaagttaggacgagaaggccaagagttattttgaagattattaatgaaatagcaaccatccccctttaaaggtatatgtttataataatattttagtaaaaaatatctaatccgttttaggagtttccttgtatgacaaggaggaatgttattgtcaatctttgtcgttaaatcgatatcctttattgaatcgttgatatattgcaagttgtgatagatatattcgaaaaatcgttgatatattgcaagttacgatagatatattcgaaaaatcgttgatatattgcaagttacgatagatatattcgaaaaatcgttaatataatttcatttaccgacatgtatatatatgatttaccgaaaacaaacaaggatgtcactcagttaaaaaagtgacatccctgtttttaattctcagcagaataaataatatctaaattcccgttttgatcggttttgaaaatcggggcaatttgctcttcttgctcttcgactgaaacaagttttcgagcacgatccataattcgaacaagcatcgcgtaatcttcttcgattgcttgttgtttttttgtgagtaccgctaatttcgtttcaagttcatgattcgttttttgcagagaagtgagctgagcttgtaatacatcattttcagtttgcaactttgcgagtgaagggttattatgctccaagttttgcaaaaatgagatgacattttgcatcgtaagttcttgtttacttggcgtaatatcttcagaaaactcagcatcgattacgagttgtttcgttttcgtgaactgatttttttctattttagcttcagagcgctttaattctttacgttgtttcttcgcaagctgcacagcatcttcgtaattcggtcttacttcagcattccatctaaagccgcaagctgctgaagtccggttcaacgtatcgccgacttcatcaaatgcttttatttgtgtacttccgctgcgaatatgtcgtaaaacagtttctgctaaaaggagatcatcttcttttgtccatgcatcttgacgtgttttcataagcgaagcctccataatggtgacgttttcgtttatgttaccctttatttttcgttttattcgaagtttgtaatctttcataaacagtagaaagtgcttgctcaaatttccctgtcgttttcggtttataatattgcttgttttttattttatcaggtaagtattgttgccttacccagccgtttggatggtcgtgtggatataaatatccaatgcctcttccaagtgattctgcgcctttgtaatgactatcttttaaatggcttggaatgtcacctgtttgaccgttgcgtaaatcgtgtaatgcagcatcaagtgctttataagctgaatttgattttggtgataagcatagctcgataacggcatttgcaagtgggatgcgtgcttctgggaatccaactcgttcagctgattcaattgcagctagtgtacgtggtccagcttgtgggctagcaagtccaatatcttcataagccataataagaaggcgtctgccaatactttgtaaatcacctgcttcaataaggcgtgctaaataatggagcgctgcatttacatcacttccgcgcactgatttttgaaatgctgataatacgtcataatgagcatcgccgcctttgtcgtgaacgaagctcttcttttgtaagcattcttctgcaatctcgagtgtgatttcagccgcttgatcgtctgtagtaaagctagataatacagcaagctcaagtgcgttataagcggaacgcatatcaccaccagaggcgtttgcaaagtgatgtagtgcttcatctgttaccgttacagcatattctccaaggcctttttctttatcttctaaagctctttttaacccaattaaaatatcatcttctgttagtgcgtgtaattcgaaaatttgacacctgcttcgaatagcggagtttattgcatggaatggattacttgtcgttgcaccaattaaagtaagaagtccgctttctaagtgaggtaatagaaagtcttgctttgctttatctagacggtgaacttcatctaaaattaaaacgaggtgtcgatgcatcttcgcttcttgtacgacaacttccatatcttttttattgtgagtaacagcattcaatagacgaaacggggtaccggtacttccagcaattgcactggcaatggatgtttttcctgtacctggaggaccgtataaaatcatagattgaaaatgattggcttggaccattcgccataaaatctttccttcaccaactaaatgttgttgcccaataatttcttgaatatttgtagggcgcattcgatgtgcgagtggttgtttcatttggaccgtctcccttaatatataatctcgttctatcgtatcatttttttctacgaaatttgaaataggatgctgttttatgggaaaaataaatgataatattttcatttttctttcaattgtaataattcccgagtttttcaatgcgattttatgttatcattttgatacacaagttgaaatttcttataatactatattatgctataatttcataggattttaaattgtgttctttttataaataagatataaccaatagaagtgaaaatttgaaaagaggtgcaaaatagatgaaaatttcaacgaaaggccgctatggcttaacaattatgattgatcttgcaaaaaagtttggtgaaggtccgatttcattaaaatcaattgcgcaggcacatgacttatcggaacattacttagagcaattaatttcaccacttcgtaacgcgcgtctagtaaagagtacgcggggagcatatgggggatatgtactatcagatcagccggctaacattacagctggagatgtaatccgtgtattagagggtccgattagtgttgtagaaatgatagaagaagaagaaccagcacaacgccaattatggatgcgtgttcgtgatgcggtgcaagaagtgttagatagtacaacgttagaagatttagtacgttatgaggaagaaaatcacgggggctatatgttttacatttaattccttgtgaaacgatttggaaagaaggagatttaatggaacgcatttacttagatcatgctgcgacatctccgactcacccagaagtggtcgaaaagatgattccatatatgacagaaatattcgggaacccgtctagtattcacttttatggacgtcaaactcgtcacacagtagatgaggcgagaagagtgtgtgcacgcagcattcatgcgaatccgaatgaaattatatttacgagcggtggtacagaagctgataatttagcgcttatcggtgtagcacgtgcgaaccgtcataaaggtaaccacattataacgacgcaaattgaacatcatgcgattttgcatacgtgcgaattgttagagcgtgaagggtttgaagtgacatatttacctgtcgatgaaacagggcgcattcaagtttctgacatacaaaaggcattaacagaagagacgattcttgtatctgttatgtttgggaataatgaagtagggacgatgcaaccgattgtggaaataggaaagctgttaaaagagcatcaagcgtatttccatacagatgcggtacaagcttacggtttagtagaaattaatgtgaaagagtttggtattgatttattatcaatttcagctcataaaattaacgggccaaaaggtgtaggtttcttatacgctggtacaaatgtgaaatttgaaccgttattaataggcggagagcaagaaagaaaacgccgtgctggtacggaaaatgtgcctagtattgctgggcttcagcatgcaattcttatagctgaaaaaactcgtgagcaaaaaaatgcccaatatgaagagtttaaagatataatggtatctgtcttcaaaaatgaaggcattactttcgaggtaaacggaaacttagaacatcgcttaccgcatgtacttaatgtaagttttacaggaatgaacattgaaccgtttcttgtgaacttagacttagctggtattgcagtatcaagtggttctgcttgtacagctggttcgattgatccatcacatgtattagtagcgatgtttggaaaagactccgatcaaatacgttcatccgtacgctttagttttggacttggaaatacgaaagagcaaattgaaaaagcggcgtacgaaacagtgaaaatcgtgaagcgattaacacaaaattagtatgggaggtgacatgatgaacaaactacctcacgaaacacgcgttgtcatcggaatgtccggtggcgtcgattcatctgtagcagcacttttattaaaagagcaaggttatgatgtaatcggaatttttatgaaaaactgggatgatacagatgagaatggtgtctgcacagcaacagaagattacaatgatgtaattgaagtgtgtaaccaaattggtattccgtattatgcagtaaactttgaaaaacaatactgggataaagtatttacgtacttcttagatgagtaccgagctggtcgcacaccaaacccagatgtaatgtgtaataaagaaattaaatttaaagcatttttagagcatgcaattgcgcttggtgcggattatgtggcaacaggccattatgcacgcgttgcttatatggacggcgaatataaaatgcttcgcggtgttgatgacaataaagatcaaacatatttcttaaatcaattaagccaagagcaattatcaaaaacaatgttcccgttaggtgaattaaagaaaccgcaaattcgtgaaatggcgaaagaagctggcttagcgacagcggcgaaaaaagatagtacaggtatttgcttcattggtgagcgtaactttaaagatttcttaagtaactacttaccggcacaaccaggtgtaatgcaaacattatctggtgaagtgaaagggaagcatgacggtttaatgtattatacaattggacaacgtcatggccttggaattggtggtaatggtgacccatggtttgctgttgggaaaaatctaaaagaaaacattttatatgttgatcaaggattccataacgaacttctatatggtgatgaagttattgctacgaatgtaggatgggtaagtaacaaagaaaaagaaacagaatttaagtgcacggcgaaattccgttatcgtcaagaagacaataaagtaacggttcaaatcgttgatgaaaatacagttcgtattctttgtgatgagccaattcgtgcaattacaccaggacaagcagtcgttttctatgatggagatgagtgcttaggcggtgctacaattgatgaagtataccgtagtggtaagaaattggattatttaggataaatgagaagcctctgccgattagcggttagaggtttcttttacataaagcgaattttcgttcgcttggaaaatacattctttgttataatttgttgtagaggtgaaggacatgtcaaacaaacttgaaacaggtattcaatatatgcaagaaggaaactgggaagaagcagctaaaaattttacagaagcaatcgaagaaaatccgaaagatgcgcttgggtacattaattttgcaaatttattagacgtattaggtgatagcgagcgagcgattttattttataaacgtgcactagagttagatgataaatctgcagcagcctattatggtttaggaaatgtatattatggccaagagcaatttactgaagcgaaagctgtatttgaacaagcaatgcaagctggattacaatcagctgatgtaacatttatgttaggtatcacacatgtacagcttggaaatgatcgtcttgcactaccattcttacaaagagcaacagaattagatgaaaacgatgtagaagctgtattccagtgcggactttgcttcgcgcgattagaacacgttcaagaggcgaaaccttattttgaaaaggtattagaaatggatgaggagcatgcagatgcgtattacaatttaggtgttgcgtacgtatttgaggaaaataatgagaaggctctcgctttatttaagaaagcaactgaaattcagccagatcactttttagcgggtaatggcgttcgtttattagagcaagaagctgaataagataaaaatatagtttaatgggtagttatccctcatctaaaaaggtgggggatgtactgctcattaaagtgaaaataccggaaaggagaggaaaaatgggaaatcaacatgcaatggatttgtttgaggaagagaaaaagtttataaaagcgcaagttcttcataccattttccacaacgaagaaaacctctattccgttgtcagtatgaaagtcattgaaacgaatgaaacgtatgacgaaaagaaagtaatgataaacggtcattttccccgcatgcatgaagatgaagtgtttacattgacaggtcattttaaggaccatccaaagtatggaaaacaatatatggttgaaacatttaaaaaagaattgccgcaaacaaaagcaggtatggtgcaatatttagcgagtgatttatttaaagggataggaaagcgtacagctgaaaaaattgtggaccatctcggagaacatgctatttctaaaattatggatgaccctgaggcattaaatggtgttgttaataaacaaaaggctcaggaaatatatgagacaattgttgaacatcaagggctagagaaagtaatgagctttttaaatggctacggttttggaacgaaactttctattaagatttaccagcaatataaagagatgacattagaagtgattcgtaataatccgtatcaacttatcgaagaagtggacgggattggttttggaagagcggatgatatagggcgtgcgttagggatatcgggtaatcatgacgaccgtgtacgcgcaggatgtttttacacattagagaatgtctcattacaacttggtcacgtttatatgaggaaagatcaacttgtaagagaaacgatgtcacttttaaacaatcaagaaggaagagtgactgaggaagatattataggttgtattgaaacgatgcaaagtgaagggaaagtcatcatagaagaagaacgagtgtatttagcaacgttattctactctgagaaaggtgttgtaaagtctattcgcaggcttatgaatcaagaagaaacaccttcatttccagaagcagaagtgttaaaaacgttaggtgaaattgaagaacaactgaacgtacaatatgcaccgtttcagcaagaagcaattcaaacggcacttcataaaccgatgatgttattgacaggtggaccaggaacagggaaaacaacagttattaaagggattgttgaaatgtatgcatcactacacgggttatcgttaaatccgaatgaatacagtgatgataatccatttccaatactattaacagctccaacaggaagagcagcgaagcggatgagtgaatcgacaggacttccagcttgcacaattcaccgtttacttggttggacgccagaaggatctttccagcgtaatgaaacggatcctgtccaaggtaagctccttattatcgatgaattttcaatggttgatatttggcttgcaaatcagctatttaagtcgttgccgacgaacattcaagttatcgttgtaggtgatgaagatcagttgccatctgtaggacctggacaagtattaaaagatttattaaatgcaggcgcagttccgacagtgaagcttactgaaatttatcgtcaagcggaaggctcatcagtgattcaacttgcccatgcgataaaaaatggaactctaccaccagatttagcacaaaatcaaaaagatcgttcatttatcggctgtacaggagctcaaattgttgaggttgtgaaaaaagtttgtgaaaatgctaaaacaaaaggctttagcgcaagagatgtacaagtattagcacctatgtaccgtgggcctgctggtattaatgtattaaacgaagcgctgcaacaagtatttaatccgaagagggaaaagagtaaagaaattgcttacggtgatgttgtgtaccgaagaggcgataaagtactgcaactcgtgaatcagccggagagccaagtgtttaatggtgatattggggaaattgtttcggtgttttatgcgaaagaaaacgttgagcaacaagatatgattatcgtttcatttgacggaattgaggtaacgtatacgaagcccgatttaaatcaaattacgcatgcatattgttgttccattcataaatcacaaggtagtgaatttccgattgttattatgccaatcgtgaaaagttacaaccgtatgttacgtcgtaatttaatttacacgggcattacaagaagtaagaagttccttattatttgcggagaggaagcagctttccaatctggtgtaaatcgccttgatgatgcaatgcgtcaaacaaccttagctagtcgcttgcaagaatcacaaggagaagtacagatggtcacagttaatggcgaggaaatggacgtggaaaacatttcaccgtatgatttcatgtaacaaggtgaaattatatagtgaaactttcaaacgcatagcgttgaaaggctccagtaaaatgtataaatgaatgcagtttggacataatggcgaatagaatctgggagactgtaaggagatgaaagccatatgtttatttgtccaaattgcaaagggaaagacattggaaaaataggtgtcaaccaattttattgctggaattgttatatcgaattatcggtttcaaaggggaaaatccatacgcatcaagttgaggaagatggttcactaagctctcttgatgatttatttgatgagaatgaaagaacgatcggataacgaaaagggggatttactttgaatctacgcaattcattaatcgcattaggtgttggagctgcagcatatcaatatgctcgtaagcaagatgtattttcaaaacgcaatatgaaaaaagcacgtaagatgattaagtcttacttataatcatttcgataaagtgaaaaactcccttgtagacaagggagtttttttatgcacccatatgtaaataaaaaagtccgatctctgagaaaagataagatagaccgtagcagccaacgccaagtattccatactgccataattgcttcgctttttctttacgtgaggaatgaataaagaaccccttccaaataccgaacccgatacaaatccattcaagaatcataaaaagtgctgataatccaagcataaacaaaaccataattagccctcctgattatattaattcatgctgtattctcaggggtggttgtccttgttatgttatttatatgtacgtctttaaaaaacagtatggtccgtatgaaaagattttaaaagtttcgcacataacctaccccatttattttcaaaataaaggtggaggaggtttttcatgtgaagaatcttaaaatcatttggatatatcgtttaggattattgttacttgtttttctttgtctgctcgtctttttaaaaattaagccgctatgggcaccgattatttttgtatttaaagtagcaatcacgccgtttcttatcgcgtgttttattgcgtatttattgcaccctttaattgaaaaaattcataaggaagggatgccccgtacacttgccattttgctcatttatatccttttctttggcggaattggttatgggatttataaaggaacaccagtcgttattaaacagttacaagagattaatgaacaatttccgcagtttacaaaaatgtacgattcgtggatggatggcgttacagaacaaacggcgaatttcccttcgttcattcatgaaaaggtgaaacaactttttgtgggtgtggaaacgaagattcaagcgcttttaaataaagtgatgagtacagctcgtggtgtactcgattcattgctcattattttcttaataccgttcattgtattttacatattaaaagattatggtgagttttatcatatcttttggaaactagtcccaagtaaatggcgaggtacggggcaaatgcttgcgaaagaaattgataaatcacttggaagttatattcgaggacagttatttgtttgtttagtattagggggagtatcagctctttctttttggtttatcggtatgaaatatccattattgcttggcattattattggggtaacggatataatcccgtacttcggtcctattttaggagcaatcccgacgttaatgattgcagcaacagtatcaacgagtttacttattaaggcggggatcacaattgcgattttgcaatttgtggagagtaacattttatcgccttacatcgttggtaagtcacttcgtatgcatcccgttattattatgcttgccttactagttgggggagaggtagctgggattgtaggattgctaatatcggttccgattttagcagttattcgcactgtcattgttcatgtgagaccgctcttgaaaaaagaagatgtgtaagtatagaagccctctatgtaagaaatagagggctaatcatatatttatttagaaagctgctcgtgtatcttttgaacgagggagctcacatcatttgtttgaatatgttttatttttttccattcgttatcatacataaatacaatttgattgttgaaaagacgcttttgttcttttagattagaaatttttgcgaaagagtactcttcaaatattggattcttacttacatctggcccataaaagaatagccttttgttcgttaaaactagcattcctggccttgcgacggaacgataaataaatatgtctaatgaacatgctgcgtaaaataatatcgtttcgtcagtcgctaatatgtttttagctttgctaagtaaggttgtcattgtgatcgctcctttattttattaacaataatttaattataacaaaaaagtaatatttagaaatttttataaattattcttataaggagattccgatttattaataaatgcatactatatgaaaaggctgttaagaatgaatagtagaatacttatgattaataagtaattaatccaatataaatgattatctacattgacaaacttaagagaattctattatatttagtcatataatacattaaatcaatgacggaacaagtacgttacagtccatttatagagagaagcttccatatggctgaaagaagctttaaatgaagggtaacagaaagctaatcctgagagcagctaatcactgccgtcttgccacgttacggcaccatgaggtgatgaattgattgttattgtaatcaattcataattagggtggtatcgcgagttaactctcgtcccttttatagggacgggagttttttatatttaaggaggaaaatacaatgaaacaactaacaggcgcacaaattcgtcaaatgtttttagactttttccaagaaaaaggacatgcagtagaacctagtgcatcactagttccgcatgaagatccatctcttctatggattaatagtggtgtagctacattaaaaaaatattttgatggacgtgtaatcccacaaaatccacgtattacaaatgctcaaaaatcaattcgtacaaacgatattgaaaacgtagggaaaacagctcgtcaccatacattctttgaaatgttaggaaatttctcaattggtgattacttcaaagaagaagcaattacatgggcttgggaattcttaacgagcgacaaatggatcggattcgataaagaattactatcagttacaatccatccagaagatgaagaagcattcacaatttggaatgagaaaatgggcgttccaaaagagcgtattattcgcttagaagaaaacttctgggatatcggtgaaggaccaagtggaccgaatacagagattttctatgaccgcggagaagcttacggtaatgactttagtgacccagaattatatccaggcggagaaaacgagcgttacttagaagtatggaaccttgtattctctcaatttaaccataatccagacggttcatatacaccacttcctaagaaaaacattgatacagggatgggtctagagcgtatgacatctatcgttcaagatgtgcctacaaacttcgatacagacctattcatgccgatgattgatgcaacagaaacaatttctggtgaaaaatatcgtaatggcgatttagaaaaagatatggcattcaaagtaattgctgaccatatccgtacagtaacattcgctgttggtgacggtgctcttccatctaacgaaggccgtggttatgtattacgtcgtttattacgccgcgctgttcgttattcgaagaaattaaacatcaatcgtccatttatgtttgaattagtaccggttgttggagaagtaatgaaagacttctatccagaagtacttgaaaagaaagatttcattgcgaaagttgtgaagaacgaagaagagcgtttccatgaaacacttcatgatggtgaagcgattttagctgaagtaattgcaaaagcaaaagaagaaaaaacaactgttatttctggagtagatgcgttccgtctatatgacacatacggtttcccaattgaattaacagaagaatatgcagaagaagctggcatgacagttgatcatgaaggttttgaaaatgaaatggaaaaacaacgtgagcgtgcacgtgctgctcgtcaagacgttgattctatgcaagttcaaggtggtgtccttggagaaattaaagtagcgagcgaattcgttggttacggtacagttgcaacagaaagtaacgttgttgcacttgtgaaaaatggcgaatacacagacagcttacaagctggtgaagaaggacagttaattcttgatgtaacaccattctatgctgagagcggtggacaaattgcagaccgtggttaccttcttgctgatggcgtgaaagttcttgtaaaagacgtacaaaaagcaccaaacggccaaaacttgcataaagttgttgttgaagaaggaacattaacgaaagatgcggctgtaaaagctattatcgatacgaaaaatcgtagtagcgttgtaaaaaatcatacagcaactcatttactacaccaagcattaaaagacgtacttggaacacacgttaaccaagcaggttctcttgtaacttctgaacgtctacgctttgacttctctcacttcggtcaagtacaagctgacgaattagaaaaaattgagcgtatggtaaacgagaaaatttgggaaagtattgatgttgagatttctcaaaaagcaatcgaagaagcgaaagaaatgggcgcaatggcattattcggtgaaaagtacggagatgttgtacgcgttgtacaagttggcgattacagcttagagctttgtggtggttgtcacgttgaaaatacagcttctatcggtattttcaaaatcgttgctgagtctggtatcggtgcaggaactcgtcgtattgaagcagtaactggtaagtctgcatacgaattaatgaacgatcaagtaggtttattaaaagaagcagcaggaaaaatgaaaacaaatccgaaagatattttaacaagagttgatggtctatttgctgaagtgaaacaactgcaaaaagaaaatgaatctcttgctgcgaaattaagcaatatcgaagctggaaacttaactgattctgtaatgacagttgatggtgtgaatgtattagcagcgaaagtaaatgttgcagatatgaacaacttacgtacgatgatggatgacttgaaaaataaattagagtcagcagttgttgtattagcgtctgttaatgacgataaagtaaacatcctagcaggtgtaacgaaagacttaattagccaaggttaccatgctggtaaacttgtgaaagaagtagcttctcgttgcggcggtggcggtggcggccgtcctgatatggcacaagcagggggtaaaaacccagctcaagtcgaagaagctttagcatttgtacaagagtacgttaaatctgtttcaaaataaagagatagtagtgtacaatggtagggagaggagaagttcttctccctatacttactatataagtgaggtgcttgaaatggacggttttgataaaacaatgaagtttagcattcaagatgaaaaacagagtgtccatgtaaatgatgtacttttaactgtgtatgatgcacttcaagaaaaaggctataatccgattaaccaaatcgtcggttatttattaagtggagacccagcatacatacctcgccataaagatgcacgtagcatcattcgcaagcttgaacgtgatgagttaattgaagagcttgtgaagtcttacttgaaacatcatcgtgaggagtagtttatgcggatattaggtttagatgtaggtacaaaaacagtcggagttgcaattagcgacgaaatgggctggacagcacaaggattagaaacaattaagattaacgaagaacgaggtcactttggttttgatcgtatttctgagttagtaaagcagtacaatgtggacaagatagtagtaggtttacctaaaaatatgaatggtacaattggcccgcgtggtgaagcgtgccaacaatttgcagaaaacctacgagagctgttacaattagacgttgtaatgtgggacgagcgtttgtcaacaatggcagcggaacgtctgctcatttcagccgatgtaagccgtaagaagcgaaagcaagtaattgataagatggctgcagtcgtaatcttacaaggatttttagatagtaaataagaggtgaccaaaatggaagaaaatcaaattacaattgtagacgaaaaaggtaacgaacatttatgtgaaattattttcacttttgacgctgaaaaatttggaaaaaaatcatacgtagtcttctctccaatcggtgaagtagacgaagatggagaccaaatttatgatgcaatggcttatgagcaaaatgaagaagagggcggaactttacttccaatcgaatctgaagaagagtgggaaatggtacaagaaatgttcaacactctagctgatgagcaagaagctgaataataagtactgaaaagatggacgacatacagtccatctttttttgtatttatatgtaaaatgaaagattttttgtcgaaactgtgtaagtctttgtagtataatgagacggattgtagaaaaataaagtgtcaattaaaaaagataagtgaattttttgcgtttttacatcgtgctgtatagaaaggtgtacatacggtctacaattaagtaaggaggaaatgttttgatagagaatcaagtgaaaaagaagcgtagacgtatctttttattttcgattattgcactgcttttagtttgtggttcagtctatgcgtatatttcatccgcattaggaccagttgatagcgggaataaaaaagagattgaagtagaaattccgaaaggatcatctacaagtaaaattggagaaattttagaagaaaaaggcgctgtaaaaaacggtacagtttttagtttttatacaaaggctaaatcgaaaagtttacaagcaggtacatatttattaaatccttcaatgaatgctgaagatgtgattgaacaaatgtcatctggcaacgtgcatcgtccagctctttataaagtgacgattaaagaaggggcgcaagtaactgaaattgcagaaacgattgcgacagaactaaagtggaataaagatgatgttacgcgtcaattaaacgataaagcatttattcaaaaaatgcagcaaaagtatccgaagttattaacggataaaatctttgatagcaatattaaatacccattagaaggttatttatatcctgcaacgtattcgttttataagaaagatacgacgttagaagaaattgtaattccaatgcttgagaaaacaaatgcaatcattgttcaaaatgaggcgaaaatgaaagcgaagaattgggatgttcatcagcttttaacattatcttcacttattgaagaagaggcaactggttttacagatcgtcaaaagatctctagtgtcttttataatcgtttagcaaaaggtatgccgcttcaaacggatccaacggtattatatgcacttggaaagcataaacaacgtgtattatacgaagatttaaaggtcaactcaccgtacaatacgtatgttgtaaaaggattaccggtagggccgatcgcaaactctggtaaacattcagtagaagctgcgttagaacctgcgcaaacagattattattatttcttagctgcaccaagtggtgaagtgtactatgcgaaaacattagaagagcataatgcattaaagcaaaaatacattacgaaaaaatagtgaaatggggagggatagcgaaaaaagtcgcacatccctcttttttgtggtaaaatatatcgggttaaaaactggcagaagaatcgtttttaatatcaaaacgggacgtacaagctaaggataaagctggcttgtatttttattgcattctatgtgtgaaaagacgtcatagaggcacttctccatgtaaataaggaggaccatttatggaggatgcagttaacgagtacctattatcatttattgatccgaaagataaattaattcttgaaatggaagaatatgcaacagaaaatcatgtgccgattatggatcgacttggaatggaatttatgctgcaatttttacgtttaattggaccgaaaagcattttagaacttggaacagcaatcggttattctagtattcgtatgatgcaagctattccaaattcacgtattgtgacagttgagcgcaatcgtgagcgatatgaaaaagcacttgaatatatagaacgttccccagtaacagatcgtatttcagttatttacggtgatgcgttagagacaggtgaacaagtaaaagaacacgggacatttgacgttatttttattgatgcagcaaaaggacagtatcgtcgcttttttgacttatatgaaccgttattaaatcctggtggcgtaattatttcagataatgttatgtaccacggtcttgtaacgacaaaagagaaaattgaaaacagacgtacacgtggtttaatccgtcgtattaagacgtacaatgagtggcttatgaaccatgaaggatatgatacaacgattttcccaattggtgatggagtagctgttagtaaaaagagagggtgaccaaggtatgaagaaacctgaattgttagtaacgccaagagcggtggcggatatcgaacaacttgcgaaagcaggagcagatgcggtaatgatcggtgagcaaaagtttggtttacgtttagcaggggagttttcacgtgaagatgtaaaacaagctgtgaagattgcacatgaaaatggtgtgaaagtatacgtagccatgaacgctatgttccacaacgataaagtagaagaattaacagattacgtttcatttttaaacgaagtaaatgtagatgcaattgttttcggagatccagcggtattaatggctgttcgtgaagtagcaccaaatatgcagttgcactggaatacagaaacgacagcaacaaactggttcacttgtaattactggggacaaagaggatcaaagcgtgctgtattagctcgtgagcttagcttagatgaaattgttgatttaaaagaaaatgctgaagtggaactggaagtacaaattcacggtatgacttgtatgttccaatcgaagcgttcattagtaggaaactactttgagtatcaaggacgtaatcttgacattgaaaagaaaaaatatgaagagaatatgttcttatatgacccagagcgtaacaataaatatccaatttatgaagatgaaaatggtactcacattatgagtccgaacgacatttgtttcatcgatgaattagaggaactaatcgatgctgaagttgatagcttaaaaatcgacggtgtactaaaaagctctgaatacattattgaagtaacgaagaaatatcgtcaagcgattgatttatgcgtagaagatcgtgatgcatattatgacgtgaaagatgatctatataaagaaatagaagaaatgcaaccagtaaatcgtccgttagatacaggattcttctttaaagaaacggtttactaaacgaggagggtgtaggaaatgactgtacaagaaatttcacgagtgatcgatggcaaacgtgttattgtgaagaaacctgaactgttaatccctgcgggtaacttagaaaaattaaaagtagctatccattacggggcagatgctgtatatttaggtggacaagaatttggtcttcgttcgaatgcaggtaactttacgctagaagaaatggcagaaggcgttgagtttgcaaagaagtatggagcgaaaatatacgtaacaacaaatatctttgcacataatgaaaatatggacgggctagaggaatatttaaaagggattgaaaaagctggcgtaacgggaattatcgttgctgatccgcttatcattgagacttgtaaacgcgtagcgccttctgttgaggtgcatttaagcacacagcaatcactatccaactggaaagcagcacagtattggaaagaagaaggtttacatcgtcttgtattagctcgtgaagcaagctatgaagaaatgaaagaaattaaagaaaaagtggatattgaaattgaagcgttcgtccatggtgcaatgtgtatcgcatattcaggaagatgtacattaagtaaccatatgacagcgcgtgattctaatcgtggtggttgttgccaatcttgccgctgggattatgatttagttcaaacagtatcacaacataaagatgcaaaagagcttcctctattccaagaaggagatgctcactttgcgatgagtccaaaagatttaaatttaattttatcaattccaaaaatgattgaaatcggaatcgatagcttaaaggtagaaggacgtatgaaatcaatccattacgtagcgactgtagcaactgtatatcgtaaagtaattgatgcgtattgtgcggatccagataactttgagtttaaacaagaatggttagatgagcttgataaatgtgcaaatcgtgatacagctcctgccttctttgaaggggttccaggacatcaagagcaaatgtttggaaatcatagtaagaaaacaacgtatgattttgctggtttagtgttagattataatgaagaaacgggcatcgtaacgattgagcaacgtaatcatttcaaaccaggacatgaagtggagttctttggaccagaaatagaaaactttacgcaaacggtggagaaaatttgggatgaggatggaaacgaattagatgcagcgagacatccgttgcaaatcgtgaaattcaaagtggatcaacgagtgtatgtgaataatatgatgcgcaaaagcatacttcaataagaaagagtgatagtcgaatggggacgaataagcctgttgtaattggaattgctggtggttcgggatcaggtaaaacgagtgtaacgaaagcgatttttgaccattttaaaggtcattctattttaatcttagagcaagattattattacaaagatcaaagccatttaccaatggaagagcgtttaaaaacaaattatgatcatccgcttgcgtttgataatgatctgttaattgaacatttgcagcagttgcttgcatatgagcaaattgataagcctgtatatgactatacattgcatacgcgttcagaagaaattattccggttgagccgaaagatgtaattattttagaaggaattcttattttagaagacccacgtctttgcgagttaatggacattaaattattcgttgatacggatgctgaccttcgtattctgcgccgcatgcaacgtgatattaaagagcgcggtcgtacgatggattcagttattgatcagtacgtaaatgttgtacgtccaatgcacaatcaatttattgagccttctaagaaatttgcggatattattatccctgaaggtggacaaaaccacgttgcaattgatattatggtgacaaaaattgcaacaattcttgaacaaaaagtaaatttgtaatagcatagtaaaagatatacggtaggaagggattttttcccttcttatcgaatacaatgaaacatgcaacctcatctatatataggtgagggcatatttatatcaactttccatacatatcttctttatataaagaagaattggaaatacggggttgtatgtgacaactccgctagtgcaagggtactagaaacctccgctaacaatggaagcggaggagttttcatatggaactcctcttttttttcgggggattggtatataaaaggagtggaaaatatgtcaacagaaaaaacataccctatgacgcaagagggtaagcaaaaactagagaacgaacttgagcaattaaaaacagtaagacgtaaagaagtagtagaacgtattaaaatcgcacgtagcttcggggatctttctgagaactctgagtacgatgcagcgaaagatgagcaagcgttcgtagaaggacgtattacacaattagaaaatatgattcgtaacgcagttatcattaaagatactggcgaagtatctactgttgttacattaggtaaaacagtaacatttaaagaattaccaaacggagatgaagaagcgtatacaatcgtaggtagcgcggaagctgatccattcgaaggaagaatttctaacgattctccaatcgcaaaaagcttattaggtaagcaaattggtgagaaagtaacaatccaaacaccaggcggagaaatgcaagtagagattgtctctgtaaaataaaaaaagattctcctatcgggagaatctttttttctgtcgaatgaaaaaaattgtgtaaaccttagagtgattcgacaaaaaatgtcaaaaaaacactttaagctttgatatcataattagagaccataggttttaaaagggaaaaggggctaattatgaaacataaaatctttacaggattggtttgtagtatctccatattaggacttgctgcatgcggaacgaatgaagaaactacatcatcaaagggagaaaaagtgaagcaagaagaaaaaaaggatattaaagcaactgagagttcaaaagccttagaaaatccacaagataaaaaggaatttaatgattttgatgtagcgtatcaattagcaattgtcatgaaaatatttcaagatgtaacgattaagtatgattacgcaattgggaatccagattatttattgcgagattcgatggatcaaaaaacaatagatgatatgaagaatatgttacaagaacaggcgaagaataatgataaaattttaaaagatgaagtgaatcaagcatatacatatttaaaacaatcgaaagtaagtaataaagatgatattcaaaaaataatagatgcacaaaataattatttacatattgtagataagatgattacttgtattgattctgtaacagttgagaatgcaaaagaaaaaagaaatgaaatggataatcttagtaaggattatttaaaaatagcggctaatgtaacaaccactgtaattgaagttgctaaaaacactggagtgaatgaaactgaatttagatcgcttcttatgaaatttttagagaagccaaagaaacaataatagccttatataatatctgtttttgttttggagattgtataaataaaatagtacctcgtctaaactacaatagacgaggtgttttttatgaaaataaaacggagaattacaattgttttaatttgttttatgagcgttatgtttgtattgctttgtcgtttaatccaaattcaaattatagatacagaatcatttactgatcgcaaaataaatttaattgaaaaaagtgttacgcaacgcacacaatccattacagtagacgatggacgtgggcagtttatagatcgtaatggtaaaaaaataggtgaggaaaaatatcctgttttaattatttttccatttttacaaataaaaaatgacatgttagagaaaatcgcgcatatcattggtgtgtcgagacaagagattagaagacaaatgaaaaataataaaaatgcatttacactacaaggagaaactgctccatttcgagtgacacgagagcagatggagaaggtaaatgaattacatgtattaggtattgtagcagctgaagtgcgattaaaacaaactggagagataaatcatttaattggtgatgtaggggagaacgaaagggagtttcaaaagcgatatggagaattgaaaagaatctcaaaacaaacgccgataggtatttcaggattacagcaatcatttgatgaatttctattgactgatggagaggcaaaagtattatatcaagtagatcggcaaggagaaccaattttcggaaagcaagcgaaatacacttcaccaggaaatccattttatccagttaggattcaaactactttacataaagagttgcagcaaaaagcagaagaagtgattgaagcgaatgaaataaagaaggggggactagtattacttgatgtaaagacaaatgaaatattagcgatggctagtaagccgtctttacaagtaagggatgagaatttatataaaactacacttgaaaatcaaatgttaacgccacattttccaggctctgtttttaaaacagtagttgcagctgcagtcattgatcaaaaagtaaatttgtttaatcggacatttaactgtaataaagatttatatggtgaaaacgacccgcaagttaggatgggtacacttaactttaaagagagctttgctaggagctgtaacaggacattttccgagttaggtaacgagctattacaaaaggataagacggtgctagaaacatacgtagcagctttaggagcaaatgaaaaggttggatggaaaggttctgtatttcatacacctcattttgagcaaatgccagaagaaaagggtactactatttgggggaatgaagaaaataaaaatagtaaaaaagcggtagaacaaacagcaattggacagaaagatgtacgtatatcacctctagcaattgcaaatatgatggcgacgattgcgaggaatggagaaaagatggaagtgaaagcagttgaaaaaatagtatataaaaatggagcggatttttttacatttgagagccatacgttaaatggaaaacagctttcgtatgaaacagtgaaaacattacaagagttattaagaggcgttgtaacaagggagaaaggaacaggaacggcattccgttcgttgccactaagtgtcgctggaaaatccgggacagcgcaaacagggaaagggacgagggtgaatcgctggtttgcaggttattttccgtatgagaatccaagatatgctttagttgttgttgatctagagactgatagcaaagtgaataaagttacacctatttttaaagatatggtaggagcaatctatcaattggagaatgaaaagtaatcttgcaatttatagtgaaatgtcttcatttcatgaaaatatcattgtaaatgttcaacctttctagatttaatgttacaatagcaattaggaaaaactgcatggaggtttggagaatggcaggaggatcaagattccaacagaaacaacaaaaacgtcgtcaaaacggtgttttaaatattgcaatcgctattgtattactattagtagctattgtagcatatcaattgttcgttcctagtacgaaagagcaagcatcttctactgataagaaagtctctcaacaaacaacaaagaatgagaaagctggaaaatcagaagataaagaatctgctaagaaaaaagaaaaagaacaagagcaagcagaagctaagaaaaaagctgaagaagagaagctaaaggctgaagaagaacagaaaaaagctgaagaagaagcgaaagctaacgagaaagtatcagctgagaaaactgtatctaaggcaaaagaggcgtatacaaaaccttcttggaaagctgtaggaacagaacaaggttcatcaccagcgatgacgtttaaacagggttcatcagattggaatgagatgcaaagtgcaattgctgcaggtgttgaagtaccgaaagagcaattagtattccattttgttggaagagacaaaactggaaagagcaaagcttatggtgatgttcaagataagcaaagtgggaaaagatattatgtaaatattgattgggtagacaatgagggctggaaaccagtacttgttcaaactctaaactaaaaaagagaggctccttaggagcttctcttttttgttaacgcaatttctttaatttaaaatgaacaaccgcgctataatacggtcttttgctttcaggatccataaccatttgatgtgagatgtgatgaacttcaagcataagtgctttattattatcaatttgttcactaatttttcgttctaaagaagctaagtctcccgcttcaaaaaactctactttatcttctaacatttcaaaggtaaatgacatgaagacggcccctctcctatgtaatcaactatagtgtaacaaagaaaagaaggaaataccatgtacatttcaattgacatttttagaaagagggaatatcatactgataaaaccgataagaaaaaggggaatttttatgggtacagaatttaatggtttatttgatgagtgggctcatacgtacgactcatttgtacaaggcgaagatatacaatataaagaagttttcgcccattatgaggacattctagaggatgtagttaacaagtcatttggtaatgtattagaatttggtgtcggtacaggtaatttaacaaataaattattacttgctggccgcacagtttacggtatagaaccgtcgcgtgaaatgcgcatgattgcaaaagagaaattgccaaaagaattttcaattacagacggtgattttctttcgtttgaagttccaaattcaattgataccattgtaagcacctatgcatttcatcatttaacagatgatgaaaaaaatgtagcgattgcgaagtatagtcaattgctaaacaaaggtggtaaaatagtgtttgctgatacgatatttgcagatcaagatgcatatgataaaactgttgaaacagcaaaacaaagaggtttccaccagttagcaaacgatttgcaaacggaatactatacacgtattccagttatgcagactatttttgaaaacaatggcttccatgtaacgttcacgagattaaatcatttcgtttgggtaatggaggcaactaagcaatagaaagagggattagattgagaattgctgtaattggagcaatggaagaagaagtacgtattttacgtgacaaattagaacaagcagagacagaaacggttgcaggttgtgaatttacgaaagggctattagcagggcatgaagtaatcttgttaaagtctggtattggtaaagtaaacgcagcgatgtcaacgacaattttattagaaaaatataagcctgaaaaagtaattaatactggttcagctggtggattccatcattctctaaacgttggtgatgtagttatttccactgaagttcgtcaccatgacgtagatgtaacaacatttaactatgaatatggtcaagtaccaggaatgccgcctggatttaaagctgatgaggcgttagttgcattagctgagaaatgtatgcaggctgaagaaaatattcaagttgtaaaaggtatgattgcaacaggtgattcatttatgagtgattcgaaccgcgttgcagccatccgtgataaatttgaaaatctttatgcggtagaaatggaagcagcagctgttgcacaagtatgccaccaatatgaaattccgtttgttatcattcgcgcactttctgatattgctggtaaagaatcaaatgtttcatttgatcagtttttagatcaagcagctcttcattctacaaactttatcgtaaaagtgttagaagagttaaagtaatgtaacaaaaaggcaactgtctcatataaagaaaatacatacagttgccttttctttattggcaaacaagggggagaacacgatgaatgtatatcgtggagttcatgagttaattggtcatacaccaattgtagaaattactcgtttttcacttccgaaaggagtccgtttatttgcaaagcttgaattttataacccaggcggaagcgttaaggatcgtttaggaagagaattaatcgaagatgcgctagaaaaagggcttgtgacccagggtggaacaattattgaaccgactgctgggaatactggtattggactggcacttgcagcattagaacatgatttacgtgttattgtttgtgtaccagagaaatttagtattgaaaaacaagaattaatgaaagcactaggtgcaacggtcgtgcatacaccgactgagcaaggaatgaccggtgcaattgctaaagcaaaagagttagtaaatgaactaccgaattcatactctccaagtcagttcgcaaatgaggcaaatcctcgtgcatattttaaaacactaggacctgaactgtgggacgcattgaatggagagattaacatatttgttgctggagcaggaactggcggtacgtttatggggactgcatcttatttgaaagaaaaaaatatagatattaaaacagttatcgtagagccagaaggatctattttaaatggtggtaaggctggttcacatgagaccgaaggaattggactggaatttatcccgccatttttgaagacatcttattttgatgaaattcatacgatttctgatcgaaatgcatttttacgagtgaaagaattagcgaaaaaagaaggacttctcgttgggagctcttcaggagcagcatttcatgcgagcttacttgaggccgagaaggcagcaccaggtacaaatattgtaacgatttttcctgatagcagtgagcgctatttaagtaaagacatatacaaaggatgggaataaaaaatgagagcaaagacaaagttaattcatggtattcgcataggagaaccttcaactggatctgtaaacgtaccgatttatcaaacaagtacgtacaaacaagaagcagttggtaagcatcaaggatatgaatattcacgtacaggtaacccaacacgtgcagctttagaagaaatgattgctgtattagaaaatgggcatgctggatttgcatttggttcaggaatggctgctattacagcgacaattatgttgttctcaaaaggtgaccacgttattttaacagatgatgtttatggcggaacataccgcgttattacgaaagtattaaaccgtttcggtattgagcatacatttgtagatacaacaaacttagaggaagttgaagaagcgattcgtccaaatacgaaagcaatttatgtggaaacaccaacgaacccactactaaaaattactgatattaagaaaatatctactcttgctaaagagaaagacctattaacaattattgataacacattcatgacgccatattggcagtcgccgatttctttaggagcagatattgtgcttcatagtgcaacgaaatatttaggaggtcatagtgatgtagttgcaggtttagtagttgtaaatagcccacaactagcagaagatcttcactttgtacaaaactcaacaggaggtattcttgggccacaagatagcttcttactacttcgcggtttaaaaacattaggaattcgtatggaagaacatgaaacgaattcacgtgctattgctgagttcttaaataatcatccaaaagtaaataaagtatattacccaggtcttgaatcacatcaaaatcacgaattagcaacagaacaagcaaacgggtttggtgctattatctcatttgatgtagatagtgaagaaacattaaataaagtacttgagaaactacaatactttacacttgctgaaagcttaggagcggtagaaagtttaatttctattccatctcaaatgacacatgcatcaatcccggctgatcgccgcaaagaattaggaattacagatacattatttcgtatttctgtcggtattgaagatggtgaagatttaattgaagatttagcacaagcgctagcataataaaaaatgcactgctctatattagcagtgcgtttttttattacgtctattttgtgaaacatttcacaaaatagacatacacaaacgaaatgatttcatgtatattgaattcaggaaacgttactcacgaacaaacttgtgaaacttttcacaaacaatgaaattcatgtaggaaagcatctctatttttttgtgttaattgggacttattttgacctacagggacatataaggaccgtaatagtagaataggaggaaattcacatggtagtcaaagagaaagttgtaaatgaaatgcaggaagtaaaaaagatgattgatacgctagtaaataatggtcaacaagctttacaagcattagaaagttttacacaagaggaaattgacaacattgttcatgaaatggcattagcaggtgttgatcaacatatgccgctagcgaaattggcagttgaagaaactggccgtggtgtatatgaagacaaatgcattaaaaatatttttgccactgaatatatttggcatagtataaagcaagataaaacggtagggattattcacgaagatcctcatgaagaaataatagaaatcgcggaacctgtcggtgtagtagctggagtaacaccagtaacgaatccaacgtcgacaacaatgtttaaagcgttaattgcgataaaaacaagaaatccaattattttcgcatttcatccttccgcacaaaaatgttctgtggcagcagcgaaaaccgtatatgatgcagcgatgaaagctggtgcaccaaaacactgtattcaatggattgaaagaccgtctgttgaagcgacgaaacaattgatgaaccatgatggtgtagcactcgttctagcaactggaggcgctggtatggtgaaatcagcttactctactggaaaaccagcgttaggcgttggtcctggtaatgtaccgtgttatatagaaaaatcagcacatgtaaaacgagctgttaatgatttaattttatcaaaaacatttgataacggtatgatttgtgcatcggaacaagcaatcattgtcgataaagaaatttatgatgatgttaaaacagaaatgattgaaaacagttgttactttgtaacagaagaagaaagaaaaaaattagaaaagctcgttataaatgaaaatacatgtgcagtaaatagtgatattgtagggaaatccgcacagtatattgccgatttagttgggatcactgttcctggacatacaaaaatgcttgtagctgaaattcaaggtatcggagcagcatatccgttatcccgtgagaaactgagtccagtattagcttgtgtgaaggcaaattcattagaagaaggatttacatattgcgaagaaatgttgaacctcggtggtttaggacattcagcagttatccattctacaaataaagatgtgcaaaagcaatttgggttacgtatgaaagcttgccgtctcattgtaaatgcaccttcatcacaaggtggaataggggatatatataatggatttattccatcacttacacttggttgtggttcatacggaaagaattcagtttcccaaaatgtaacagcgactcatttattaaatataaaaaggctggcaaatagaaaaaagaatatgcagtggttcaaactgccaccaaaaatttattttgaaaaacatgctacagcttatttagcaaatatgcctaacatttcacgtgcatttattgtaacggactccggaatggttgaacatggctatgtcgatacagtcgcgcactatttaaacaagaatgcaaatgatgtgaaagttgaagttttctttgaggtcgaaccagatccatcagatgaaactgttttcaaaggtgcggaaatgatgaaaagctttaagccagatgtaattatcgcacttggtggtggttcagctatggatgcagcaaaaggaatgtggttattctatgagcatccagaaacgacattctatggtattaaacagaaatttttagatataagaaaacgtacatgtaaatatccggaattaggaaataaggcgcagtttgttgcgattccaacgacatcaggaacgggatcagaagtgacaccatttgcggttattacagataagaaaaataatataaagtatccgctcgcagattatgaattaacaccagatgtagcaattgttgatccacaatttgtaatgacagtaccaccacatgtaacagcagatactggtatggatgttttaacacatgcaattgaggcgtatgtgtctgttatggcaaatgactatacagatggattagcattaaaagctattgatctcgtattcaaatatttaccgagagcatataaagatggaaatgatgaagaagcaagagaaaaaatgcataacgcttctgcaattgcagggatggcatttgcaaatgctttcctcggtattaatcacagcttagcacataagattggaccagaattccatattccgcacggacgcgcaaatgccattctaatgccgcacgtagtccgctataatgctattaagccaagaaaacacgcattgttcccaaaatatgagcactttgtggcagatgaaagatatgcacatatagcgagaatgctcgggcttccagcaagttcggcagcagaaggggtggaatcactcgtccgagcaattattgagcttggaaaaagcttaaatattaatatgagtattgcgggacaaggagtcgataaagagcaatttgaagaggttgttggagtattagcagaaagagcttttgaagatcaatgtacaactgctaatccaaagttaccgcttatttcagagctgaaagaaatttatatggaagcatataaaggtgaataatgataaaaaaagagccgcagtaaaagcggctctttttttattggaaaacatctcccagaatggctgtatttactggtctttcagtttcatagaatatgatacagtgaaatggaggagtgagaatataatgaaagaattaaaaggaaaaatagaagattatactcggtttggacaaatgcttctcgctgtaagtacattgttaatggttggcttattgattccgagtggagcaaaagagacaatccaattttttgttatgatggggagcatcgttatatttttaagcttatcgttctttttctttcagcgtgtgaaagtgatgcgtgaccagctagaggaaaatgaatgtgaataatattgttaactagagcgcagcgaaaagaaaaaatctttttgtcgcgctttttgttttttgtaggaaaatatatgtgtttcgtgttgacaatgataatccttatcaattaaagtataatagtagttaatgattatcattatcgattagaggtgaagaaatgaagaaatctattacgctatttacagcgattttatccatttttttcttgttaataggttgcagtgccaaaggggacgaaaaagcgtctgcaaccaaaacagaaaaaggaaaagagaaaatcgaaattaccgacctatcaggaagaaaggtaacattcgataaagtgccagaaagttttgcaacattaagtatgggggacatggatattattcatgctttaggtggaaaaatagtaggtcgcccggatacgaaattaactcttccagaggagttaaagaaagcacaagtaattgggaatgcacatcaaccgaattttgagcaaattgctagtttgaagcccgatgtacttgttgctaacaatggattccaaaagaatgtgccaacggttgaaggacaaggaacgcaagttatcatttcttctgcgaattctgtacaagatattcaaaagaatattgaattatatggaacggtaatgaagaaagaagataaagcaaaagaaattaatcaaaaaatgaatgatcaaatgaagaaatatgagaaaaaaagtgatgtgaaagcattgctagtgtatggcgcaccaggaacttatttagcggcattaccaacatctttatcaggtgatattttagaaaaaacaggcggaaaaaatattgcttctgattttccagaaacgaaagaatatccgcaatatgcacagctaagtgtagaacgtattattgaggcgaatccagatgtcatttatttaattacacacggagatccaaaaagtgtgaaaaaagcatttgaaggcgaaatgatgaaaaatgaagcgtggaaaaatttagaggcagtaaaacaaaaccgcgtagttattttgccacctgatttatttggatctaatcctggtacaaaagttacagaagcaatggactttatgtataaaagtatacaagatgtaaggaaatgatacgtatggaaagtagtgaagtagtaagagaaaaggaacatccttttgcgaaaaaaagatggataatagcagttactttagttgtattaacaatcctaggtctcttttacggtctcttcgcaggaagtttatccttttctgtacgagatattttaacaggtatacaagaggaaggttcgacagttcatcgaattgtatgggatcttcgcataccgagagtgctcattgggtttatagtaggaacatgtttagctgcatctggtacactgctacaaggggttatgagaaaccctcttgcagatcctggtattatcggagtttcatctggggcaggccttgtagcaattgtcatcatgattttattcccacagcatctagcttttttaccactaggggcgtttttaggagctttcataacagcaatggttatttatgctttatcatggcaaaaaggggcatcaccttcaagaatcgtcttagtaggggtgtcgatcaatgcattaattggtgcagcaacgtcagcattaatgttattacatagtgacaaagtacaatcggtgttaccgtggctagcgggcggtattggtggtgtaagttgggcacatttaaacatgattatttattatgcaatattcgccattatattagctttctttggtattaagcatattcgagtgttaatgcttggagatgaaatggcaaagttattaggacataacgtggaaaaaagtcggttttatttaatcgtagtaagtacattattagctggaattgcagtaagtgtgtctggtcttattggatttgtcggtcttgtcgtaccacatatgctacgtttattagttggaaatgattatagatatttgctacctttatcatgccttggcggcggggtattacttgtttttgcggatgcaatagctcgaagttggtttgacccaatcgaattgcctgttggtattttactgtccttcttaggtggtccgttcttcttatatttaattcatagaggaggaaaacaaagtgatttccgttaacaaagtgttttacgcacactctgaaagatttcaaatgcaaaatatgaatgtacatattaaggttggagaaatcgttagtttaattggtccgaatggatcgggaaaatctactttgcttcgtttaatagcaaggctactgaaacaaagcgaaggggacatcattttagatgggaaaaatattcatatgatgaagagtgctgatgtagcgaagcaattagcaatgttaccacaaatgcatgatcatcaattagatttaacagtgaaagaactaattgagttcggaagaggtccacataaatcatggagtagccacttaaataaagaagatgaagaaattgttgattgggcattgtctgttacaaatcttgaagggtatgaatatcgtcttttacattctttatcaggaggggaacggcaacgtgcttggattgcgatgacgctagcgcaacgtacaaatgtcttattattggatgaaccaacaacctttttagatatcgttcaccagttggaagtaatggaacttgttaaacgattaaatgaggagtttggaatgacaattataatggttttgcatgacattaaccaagctgctcaatatagcgatcgtttacttgtattaaagcgaggaaaaattcagtatgatggtataccagaagaagtactatgccatgaaatgtttcaacatgtgtttggcatagatgtagatatttttcagggaagtgacaagcctttttttacaccgaaacgaatttctaaaaggggagaagagcgatgcaagcagaagagcgtattaccattgaattagtaagagaatttgttatggcagctcacggggatttagagaaagtacaagagctattggttgaatcaccaagcttacttcacgcctcttataattggggtggatcagattgggaaagtgcgttaggcgcatcggcacatgtaggtcgtaaagatattgctctttatttactagaaaagggtgctcggatggatatttttgcagcagctatgcttggtgaattagaagttgtacaagctattttagtagctcaaccagaagcattgcgtgcatctggtcctcatggtatttctcttcttcaacatgcacgaatgggtggagagaaatctaagcgtgtatatgattatttagcaatactatcttaatgaacggaagaagttcttatgtgcggtaaacttttcacttgaaacaattggaaagtttaccgcccgttagaacgggataagtatctagtatatttgaaaatcctacacccccctcaattgtagttttctttatgctagttatgatatggatgcagtggacaatatttgtctactgctttttttgtttctataagattgaatattctgtgttatgtagttgattcatttataataaatggtaacatttattgtgcatacaaaatatgatcgtgaaattaagaataaattagtggaaaggagtgaaggaatgtttcatacagaccgtttacaaattcgtaaatatacaatggatgatttacagttctacgcttcactatggggaaacgaaaaagtaatgcgctatattggaaacgggaagttaaaaacatatatgcaatgtaaaaaaagtttggaggagtgggtaattcctagctataaaaacggcctcggtttatttgtattaattgaaaaggaaacgggaatacggattggtcatgcaggattagtaaagcagcagatagatggaaaagaggaaattgaaattggttattggttattacctcagtattggggaaaaggctatgcgaaagaagcagcggcagcatttcgagactatggcttccaagcgttaagaatgaataaattgatttctcttattaatccggatcaccccgcctcaatctttgttgctagaaaaacggggcttagttatgagaaaacaacttcatttcatgggatggatgttctcgtttattccattaggcgcgttggatgaaaaaaggttaattgcattttttgaagaatggtatataaaaataaaggggggattacatgtacatttatcataatggacttattattcgtgagggaacgaatggtgtacctgcatatgcaattaagactttatttgaagatgccggttggagcaatgataatatcccttcttggcaaattgaaaaattcacgatagcatttgaaaattcaacatgggcattcacaatttgggatgaagaagagatgattgccatggttagagtcgtttctgatggaatcatggtcgcgaacatagtaaatttagttgtgaaatgtgaatatagagggaagggattaggtaagaaacttgtcgctctttgcttgcaaaagctaccacatggtgactggtttgcacatacttctgcgaacaattttgatttttatagaagctgtggatttgaagttagagagctatcgagaaatggaacatgtgcgtattatggatatcaagtcgcgaaaagagatggtcaccgataaatgaatgaaaagtaaaagtttagcgaggtaattttgaggatttgataatagagaatggattgaggcacattttatgataaaataaaagaaaattctgtttattattagggggataaaaatgagtataaaagttggggatgtatttaaatatgaaagaagatttactgaggaagaggtgtttgaatttgcaaatattaccggagataaaggtagacaccatgtggaatatgatgaaaatggaagattaatggtccatggtttattgactgctagcattggaacgaaagtaggcgaagaattacattacatagcaagagaattagtaagtgagtttattagaccagttttcacaggagatacgatcacttgtgaattaactttaacaaatgttgagcaaatggaaggctataaaaaagtttcaatcgagtcagtttatcgcaatcaacacgaaaagactgtactagtggggacaagttatggaattataaggggataaaaaagaagcctgtttagcaggcttcttttttattatttagtaaacacgttttcgattttccgcataactagagatgagtagtaatgcagtttcttctcctatattacgaacaatatgaggaacgcatgcattccatgagaaagaatcaccttcttctacaattgcaatatcttcaccgtgctgaacttctagttttccgcgtaatacaaggtgacattcttccccttcatgggcatttggtgagttttctttcgggaatccagtagggatttctactaaagataggcgaaggcccccttgctccgcaacatgttcaattctttgctcatctttgccgtatacactgtatttccgttcttcttttttgacaatttttaatcgatctttttgctctaacaataaatagggaaggggaacgtttaaaaaattggagatcgtttctaaagttgagatagatggtgatgttttattattttcaacctgactcataaatcctttagaaagacctgttccctcacaaatttgtgcgattgttatgcccctacgttgacgaatttcacgtattgcagaaccaatattcataaaatcaagctcctttttgtaaacaactatttgtatcatagcaaaaaaaatatattttttcccagtgaaaatgaattgacgaataaaaaaaattagtgtatgttttgtaatgtaaataaaagttttgtataagaaaactataaaggagagaaagaaatgaatcaacatattggtaacttaattattcgtatcgtgttaggggtaacattcttcatgcacggtttaacaaaattccaatcaggaattgacaatattgcagggtggtttacaagcattggtttaccaggaggacttgcatacggtgtagcaacatttgaattagttggaggcctattattaattctaggtttaggtgtaagatatattggattattatttgcacttgttatggttggagcaatcgtaaaagtgaaatggtcagctggtttattgggagatggaaaaaatcctggtttcgaattagaacttgcattattagcaatgggtgcatacttatttgttgcaaaagctgatggttttgtagataatttcttaaaagaaaaaatgtcaaagaagaactaatttaaatggggggctaacaagatgagttttcaacttcatcccgatacaacactggatgttgttcatttatacgtatctaatgtaaagaaatcactagagttttatacggaagtactaagtatgaaggtgctaaaagaagaaaaagcagtcgttacatttgggaatgaaaatgatgaaccacttcttatcattgaagaaaagaaagaagcttttccgaagcaaagaggaagaacagggttatatcattacgcaattttattaccaagtaggcaggatttagcgaatgttcttcgtcatcttgtagaaatggtatatccactacatggtggggccgatcattactttagtgaagctctttatttagctgatccagatggaaacgggattgaaatttatcatgatcgacaaaaagaagtttggcgtgatgagaatggagagctcccatttgttagtaacccgttagctggtgaagaattattgcagcaaggaagtacatggagtggatttccagctggtactgtgatggggcatattcatttccatgtagctgatttagaggaagcgaaacgtttctatgttgatggtcttggttttgaagtaacaatcccagctcgtaatggagcgttgttcgtatcagcaggtggctatcatcaccatatcggtttaaatacatggcaaggtgaaggggtaccaccgcaaatgccaggttctgttggtttgaaatatttcacaattgtattagcggatgaaaaacaaaaagagcaagtatgtgaaagcttaaaaaatattggtaagattgctacgtacaaagatggaatattacaagtcgaggatccatttggacattgtatccatttccaaataaaaagagaagcctaaaaaggcttctcttttttattttcttataattgcattttcgttttgtaaaaatagttcatcaaattgttttgcaagctcaaaatctagtttcgttaaaccttttgcattccaagatgacaaagtaataataactgctttatactggataaggataaatggatggtgattatgttcttctgatagtttggcggcttcagagacaaattcgactccttttaagtagtcggaaaacatatattttcgttcaatccatttctcatcttttaccatccatttatctaccttcaataattcctcgtgaacttcttcttcagttaatcttagcatcatttttcacatcctttattggaagtaacgcaagaccattgttaataaggcgtgttacagcttcgtcagttgtgaaagtagaaagttgatgtagtaatgctgcagatgtttcatgccctttgttatgctctaaaagtaactctaatacttcaaggcgcagcaaccattctttcgcataaaatttatttaatacttcttgaattgctactaattgatcgatatgcgcgtcgtgtaaaatcccctcacttcgaatatctcgaactgtttgatacatacgctcgagttcattcagtacaagcggagcaggaatttcttgaacttcttcatccattgggaaaaatgctgctgcatctgcggcacctgggaatactgaagtgatttgtgagccaacagccatatcaaatgcgccccatgaagcatcaaataaaacgcgggcgttataagtaactgtgcaatcgataaaggaaataagagcaattttcttatcatttttcacaatatctgttactgttccttttacatgaataccacttgcaaaagtaaactcagcgatagttccaattttaattcctaatgattgtagttgttcgtctgtacaattttctaatgcaatattttcagtaagtaatccaatcggtgttccaaatccgtcactgtgtacagaagtagaatgattcgctaactgtttattatgaagcgctaatgccgttggcgaatttgttcgcatgtaaattaattcacctgcatcgttttcaattgtctcgctaaatgtacctgtgatttgtaatccactatttagctcagctgttgcatagttctcagagcgaattgctttttctaaaccttcttttccacctgttttaaaggccatcgttttagaaaatgtttcaagcgcatctgttaattcttcaaaggattcacaaacaaatagttgtggttgcatttttgttacgtcataagttgtccctgtacatgcttcgatagaaaatggaaccttttctacagcgtctgttaagcaatgtttgctttcgccaacagaagaaaggagaccagcaccatatatctttggatcatctatatttccgatcaatccatattctactgtccaccagaaaagacgtgaaatttgttcagcttccgataaaccagaaactaagttttgtttttcaattacagcattttcagcagccttaacttcatcaggagtagaagtagggctttcttttactatcgttaatgtacgaacagcttcaaatgcatcatgttcttcttttgtagagaaagcttttgcaccaatttgcccaaaacgtttcacatattttgcatatgtaggatcaagtaaaatcggtgcgtgtcctgcggcttcatgtacgatatctggagctggtgtgtactcgatattttctactttccggatatctgttgcaatcggtagtaatccgtgtccttgaaaatcgaagaatgctacgccaggaataagtccgtcaattgttacagcgccccagccgcttggtgccaaacactcattcatttcttctacttttggaattgcatctatattaataccagatgattgtagtccgttcacataggctggatgagcaacgtcttttaagaagctatgattttgtctcataatgtaacgccacacagcgtgattcaccggtgtgtattgatcataatgttgtgtggatacaaatggttttaaatgcgatggaatttctgttttctttgtcatttagacatcctcctttttttcaataaaattgaatatcgatttcgtatagcttgtatcaccccctttcattttttttgtaagcgcttataaaattttatcataagattcggaattatttaacatatgtttctgtgataaatagaaaaagcccctatcggaaaatccgataggggcgaaagaatcgcggtaccaccctatttgtaagtgaaaatatacttacatctcaattaatgataacggaaaaattccgtcttttcctccatgcataaaagcattacgaaaaagaagctccagaattgtaattcatacttatatatgtgctaatttccaccgaccattagctctctgtaacagggatataagatactactgcgattctttcaacgcgtatatatgaaattgtgtaagaggatggatgcaaaaaagtccctatcggaaaatccgatagggacgataaaaatcgcggtaccaccctatttgtaaacaactaattgtttaccactcactttacgataacggaaagatccgtctttctcttcatgcataaaaagcattacgggaaagaagctccagaattgtaattcacgcttgtatatgtactgattcgcaccaaccatcagttctctgggacagtgatataagtcgctactagcattccttcaaagccgatatataattcgttaaactaaactatgttttgtattataaaactatattaaaaaaattgtcaacaaaaattttttatcccgtgttaatgagcagtaaaattcctacctcaaaattcggtgggagaataattgcccgtaacccccgattggtgaaggctaataatcagtggggatgaacaaaatctctactgattaaggtttcactttatttcacttctaaattaacagttaaattagaggtattgccagctgcatcagttgctacaatgtgaatagtatttttttcttcgtgtaattgagtgcgatcgaaataaatgtcatagcttttctcccaagggttcaggaatgcctgttcccatacaccatttccgttaatttcatattgcattctcactggaataccaggtgctttttttagctcagcatgataagactgagcattactattttgtaaatctggagcatgctgaatattactttgagcagcgagaggtgcatgttgcaattctacaattactgatatttcttttgttgttttcgtttcaacattttgagcaattttatgttctccccactgttcaatcgttgtttttaattgtggactaaattgcttctccttttgtagtgattcagcatgagcgcttaaagctccaaaactagaaaagacaagcgccatgcttaatagtgtagatgtagtttttttcattgatactccccctaataaaaagtgacaatattcagaaattaaatcttacattttagttataacttataaatataaatgttggctaaactatactttcaacataattcataccaatcctctatgaattgaaaatttcttgggaaattttttctgattatgtcgaatcgatatttttcacatattgtaggaagaaagtgaggaatgctatgagggaaatggagtgatggtatgaaaaggctaatagtaagtggtagtgtagtgttgtttatgtttttgtgttctatcactattactagcgcagaaaataatagtgtgaaagttgcttttattcgtcatcataacctttggattaaagttgaggggaaagaaaaacaacttacaaaaggagagaacataacagggccaaagtggtcacatgatggagaatggctggcatatgtaaaagggaagaaacaaaatattcttgagttatatcggctgaaagatggaaagaaagttacgccgtttcactcagaagcatcgaattatcaatggtcaccaacagaaaatataattgcatttatatttacaggtacattaaatacatttgatgtagaaaaaaagaatgcagattttgaaaatgtatcggctggtgtaggggattatgcatggtaccccgatggaaagaactttcttgtatcctctgaagcgcacttacttccaacaggatggacaggggctcagctatatgaagtgcaaaaagatgcacatatgaatcctcacaaaatgaagcatttgtatgcattgccaaatcaacatgatgatttcctagcgctagtagcaagtggctttaagtggtcaccagatcaaaagtggatttcatttttagcagtaccgacagcttcatggtcagctgatagtaatacgctttgcttagttcgtgcagatggcagtcggtttgaaaaagtagatcaaatgttactaaacgcacaatggtttcaatgggcaccatcaaaaaatatattagcttatattgaagggagcggaagagttgcattagaaaataagcatttaaaagtaaaggaattgccagcacttcagcagaacatatttacgccgaaaggatatgttgattgggattttgtatggaagaacgatagagtaattatcgtttcacgagcaaaggaggcagggatagaaactccaccagaaaaaaggccactaccatctttgtatgaggtcgatagtacaagtaatgcacagcatcaaatcacaaagaaaaagaacaagcaaggggattaccacccgatcttcatgaagaagagtaatcaattaatttggatacgttcagaccgtaagaaagcggatgtatggcttgctcataaagatgggaaacaggaaaagaagtggattgaaaatatagatgtaccagcgtggtattatgagaaatggaattgggaaaatgtcatctcggtgaaataacaataaaaaactgcctaaaagatcattttaggcagttttttattgttatttatgcgttttatttggcttttttttcgctgggtttccgttcccttggcgctttctattttgttcatcttttgcttgtttttcatgtagtgtatctaaaaattcattcgagtatataaatgctaacttaaatatgtacattaacgcttgaataaatatgtacattttcgaataacgttttttgacacttgggggtagtgcaaattcttaagttgatgggcatgtgtgctttcccctcagatacattttgagtgagtcgataccaaagccaaaggtcattaatgatggaagcaagatcggcaatttctgaatttagtttacaagaaacttcgaagtcttcttcgttatttaaataatgttgttttttattaatatagtgctcaagttcttttatacgatcaggaattttcccgcgaacttgttcccattttagtaaaatagcatgttgcattttttcggggatttcttcccagtcttcttgtaaatgtggaatttcaattcctagatgttcatcgtataagaaatacttttccataagttcacccccgttttcctgcttatattgtacagaaaaacagaaagaagttcgacgaaattgtttgaaaaaatttgaaaatgactcttgatacattttgtgaaaggtgttaaagtgtgaattattataaaagaaaatgaatatttattctttaggaggatgcaaaatggagaagaaaaaagttgtattagcatattccggaggtcttgatacttccgttgcaattaaatggttacaagagaagaattatgatattatcgcgctttgtttagacttaggggaaggtaaagacttagcatttgtaaaagaaaaggcactttcagtaggtgcaattaaatcatatatgattgacgttcaagaagaatttgcaaacgaatatgcattgatggcgatgcaagcacacacattatacgaaggaaaataccctcttgtctctgcattatctcgtccgcttattgcgaagaaattagtagaaatcgcagaacaagaaggcgcaactgcagttgcacacggatgtacaggaaaaggaaatgaccaagttcgttttgaagtttctatccaagcattaaatccttacttagaagtgattgcgcctgtacgtgaatggaaatggtcacgtgaagaagaaattgcatatgcaaaagaaaacgatgtaccaattccgattaatttagatagcccgttttcaatcgatcaaaacttatggggacgcagcaacgaatgtggaattttagaagatccatgggcagcgccgccagaagatgcatatgagatgacattagcgttagaagatacaccgaataaaccagagtttgtagaaatcggatttgaagcgggcgtaccgactactttaaatggcactgcatattcacttgcagaattaattaaaacgttaaatgcgcttgctggaaaacacggcgttggacgtattgatcacgtagaaaatcgtcttgtcggtattaaatctcgtgaagtatacgaatgcccagcagcaatgacgttaatcactgcgcataaagagttggaagatttaacacacgtaaaagaagtagcgcattttaaaccagtgattgaacagaaaataacagaacttatttataacggtttatggttctcacctttaaaacaagcgcttcatgcatttttacaagaaacgcaaaagaatgtaacaggtacagtgcgtgtgaaattatttaaaggtcatgcgattgtagaaggacgtaaatctgaatactctttatacgatgaaaaattagcaacatatactgcccaggacgaatttaatcatgatgcagcagttggattcatttcattatttggtttaccgacgaaagtatacagccaagtgaatcaaaagaaggtggaagcgtgagcaaactttggggcggacgttttactgaagaagcggaagcgtgggttgaagagtttggagcatccatctctttcgatcaacaattagtaaatcaagatataaacgggagtattgcacacgtaacgatgctagcaaagcaaggcatcgttacgaaagaagaagcagagaaaataaaggtaggtcttcaatatttattgaaagaagcaaaagagaataagctacaatttttagtagaagcagaggatattcatttaaacatcgaaaaaatgttaattgaacaaattggcgaagtaggaggaaaacttcacactggccgaagtcgtaatgatcaagtagcgacagatatgcatttgtatttaaaagaaaaggtagaacatattataaaagctacaaaacaattgcaaactgttcttgttcatcaagcagaaaataatattgaaacgattatgcctggctatacgcatttgcaacgtgctcagccgatttcatttgctcatcatattctcgcttacttttggatgttagagcgtgatgtaaatcgttatgaagattcgttaaagcgtattaatatctccccattaggagcaggagcgctagctgggacgacattcccgattgaccgagaatatagtgcggagcttcttggatttaatggaatatatgaaaatagtttagatgcagtaagcgatcgtgatttcatcttggagtttttaagtaactcatctatgcttatgatgcacttatcgcgcttttgtgaagaacttattttatggagtagccaagagtttcaatttattgaaatgagcgatcaatacgcaactggaagcagcattatgccgcaaaagaaaaacccggatatggcggaactaatccgtggtaaaacaggcagagtatacggtaatttattcagtttacttacagtaatgaaaggattaccgctcgcttacaataaagacttgcaagaagataaagaaggaatgtttgatacagtaaaaacagtagaaggatgccttcatattatggcgggcatgcttgaaacgatgactgtaaacaaagaaaaaatggggcaagctgtgacgcaagatttctccaatgcaacagaaattgccgactatttagcaaacaaaggactaccattccgtcaagctcatgaaattgttgggaagttagtgctatattgcacacaaaaaggaatttatttattagatgtctcgcttgaaacatataaagaaatgagctctttatttgaagaggatttgtatgaagttctttcaccatatgcggctgtaaagcgtcgtaatagttcgggtggaacaggatttgaacaaatcaaaaacgctttggagaaggcgaaggggttaacgaaagaatttattaagaattgagttgggaagtacgccagtctagtaaagtctggcgtactttgttttttaataatatttaagttacaatatagtaaaaaataacaatttaggggaagtctatgaaaaaaatagtgtttatcattgtactggtaattagtttaattgcaaatgctaaagtgtttcttttggacaaatatatgtatgttggtgaaaaagaaaagcgagaagaagcgattatcgcaacgatgtggcatttgcaagataaaggatataaagaaagtgatattttatatataaaaccggccttttatagcaaaatggattcgtatggaatgaatgtgcagtttaaagatgaaccaaatgaatcatatacatatagagttttaaaagatacgaaaacaaataaactaactgtacaccaagatagcaatgagcaaggtggtatgggcgggaagcatcaagagcttaaataaagaaagaaaacgactgatggcattcgcctgcagtcgtttttcttttaatcatacttatgtcgttcttccgtaattcgaatatactcaatatccatcaaatctctaagtaatgcaccgttacttagttcaacgccatgtttctctttaaaatgagtacgaatcgtatctagcatttcgagttctttcccattcacatctaaaataatacgttcagaatcatccatgttgcatcctccttttttacacatatatattttgtccgtctatttctaaaaaatgtatgttaacgtaatgttaggaaataagaaagggatgaaaaatgagacgtatttattttatagggttaattttgtacacgctaattgtattacacgttgcattcccaaatatcttttcatttgaggatttagaaacagtacacgttgcgatatttatttttgctctatttgtagtagattgctttatttctatatggatttcgaaaagaaaagatatacaaggtgaaaaagaaatggaacggaaaaagagaaaacattcattttggatgatgacatactgtttgtctttagtgcttactgctgctttttttagtgaacatattccattagaaagattaaatattggatttggagcgttcgtattcgcatactattttttttatgcactttcttccttatatgaaagaaaagcgaggagaagaggaaaatccgcttgtagaagaagcgaaagaacaagagagtaagagaattgaaggagatataaagaaacttggagaacaaaaatggtatttaaaatcaaaaatcatatatgttctttgcttcattacgccgccaatcggctatttgtacgtcttcttacttcgtaaaaaaatgacagagggtgcaaagcaaacgtacttaacgatcgcgacaatcatgatggcgttatggtctttgaagtttcttccgccttatgtgttggcaattaccgttgttgtcgtagcatgtcttgtgtttatagtgaagtttatgaaatgaaaaacaccaagcctatgtggacttggtgttttatctataaattaaagctcaccttgctcttcatcaccacgaacaacaaggacatcgcatttcgcatagcgaataatatgttcagagacgctaccaattaggaaacgctcaacagcatttaaaccagtcgcaccacacataattaaatctactttatggtttggagcgatttcttttgaaatttttgatttaggattaccgaattctaatacagtttcaattttttcaagaccagcttcaagcgcagtttttttgtagtcttctaataagtcttctgcaaatagatttgcccgttcagcaattgcacggctataagcttctactgctgagtatgcttttacatcaacgatatgagcaattgttaatgttgcattgttgcgctttgcgacttgaattgcttttttaaaggctttttctgcttctttagaaccatccaccgcgattaaaatatttgtatatgtattattcatagtaaattcctcccaatctgttttataactgtttacaacttaattataaaacaaattttggtaacgtgcttgccagaaacgttacagaattttgaaaactctgtttcaattcattttagttgtaattggagcgagaacttgttacatatgaagtatagcaatttaaaagggggcagttttgtgagacatgcgctcattacagccggtacgaaaggtttaggaaagcaagtaacagaaaagttattggctaaaggctattcagtaacagtaacgtaccatagcgataccacggctatggaaacgatgaaagaaacatataaagatgtggaagagcgtctacaattcgtgcaagcggatgtcacgaaaaaggaagatttacataaaatagtagaagaagcgatgagccattttggcaaaattgactttttaattaataatgctggtccatatgtatttgaacgaaaaaagttagttgattatgaagaagatgaatggaatgaaatgattcaggggaatttaacagcggtatttcatttattaaaacttgtcgtcccggtcatgagaaaacagaactttggccgtattattaattacggatttcaaggggcggatagtgcaccgggatggatttatcgttcagcttttgccgcagcgaaagtaggacttgtttcattaacgaaaacagttgcttatgaagaagcggagtatggtattactgcgaacatggtatgtcctggtgatattataggcgagatgaaagaggcaactattcaagaagcacgtcagctgaaagagcataacacaccgattggtagatctggaacaggtgaagatattgcaagaaccatttcgtttttatgtgaggacgattccgatatgattaccggtacaattattgaagtgactggtgcagtggatgttattcatagacatcgatagaataaaataagatgaagtttcgaataattggacagtttatccattgtgctgagaggtgcggataatactgtcctttaatataaaattaaatctatcggaaaactcgtgttatttttttgtcaaatattgagatattatgttaaaatataagagcgtagaaagcgctttaaaaaaatgattcaggggtcatttcataactcaagggggaactaatcatgcgtatcggtattccaacagaaattaaaaacaatgaaaaccgtgtggcaatgacgccagcgggagcagtacatttagtacaaaatggtcatgaagtttttgttcaaaaaggagcaggtttaggatctggctttacggatgaagaatacgtacaagctggtgcgaaacttgtagaaactgctgaagaagcatggaatcaagatatggttatgaaggtaaaagagccagtagcaagtgaatacggctatttccgtgaaggtttaattttattcacatacttacacttagctccagaaccagaattaacgaaagcattaatcgataacaaagttgcatcaatcgcatacgaaacagtacaattagacaatcgttctttaccattacttgcacctatgagtgaagtagctggtcgtatgtctgcacaaatcggtgcacaattccttgagaaaaacaaaggtggtaaaggtattttacttgcaggcgttccaggggtaaaacgcggcaaagtaacaatcatcggcggtggtcaagctggtacaaacgcagctaagattgcagtaggtttaggtgcagatgtaacaatcattgacttaagtgcagaacgtcttcgtcaattagatgatattttcggtaaccaagtaaaaacattaatgtctaatccatacaacattgcagaagctgttaaagaatctgaccttgttattggagcagtattaattccaggtgcaaaagcgccaaaacttgtaactgaagaaatgattcaatcaatggaaccaggttctgtcgttgtagatatcgcgattgaccaaggtggtattttcgaaacaactgatcgtattacaactcatgacaacccaacttacgaaaaacacggcgttgttcattatgcagttgctaatatgccaggtgcagttccacgtacgtcaactcttgcattaacaaacgtaacagtaccatatgcagtacaaattgcgaacaaaggttacaaagatgcttgcttaggcaacactgcattactaaaaggtattaacacattagatggctatgtaacattcgaagcagttgcagaagcgcacggcttacaatacgctgatgcgaaagagcttcttgaaaaagctcctgctttatcataatagaaatacattcgagaccttcctttatgaggagggtctttttttatggagaaataacatgtgaataattgttatttattggtgtaaatcattttttattatgataatttagaattatataataaaaagaggggattcaatggggagtaaaaagaggaagaaaaagcaagcaaagagacaaaagtacataaagaaaaaacaggagcagaacatacctttttcacaaaaagtagtccttatgatagaaaaagtatttcgatatatttgtatgttcttgtatgtgattttttgtgtgtttttatgtgggatggttaaatgtttggggataacacctaatgttattgaaggtatttttggcgttatgcttgttatggtagaaggaatcttattctttatattatttgataaggtttggcctagtcatgaaagtaaaaaagatagaaaaagaagcaaaaaatcttcatccaattcaagctcatcaagtggattcggtgactacagtagcaacgattgtagcagctcaagtgatggcggaggagattgcggaggtggtggagactaagttggtttttcagaagaacgactaatggaaggatgggatgaaatatggaaactgtgaacttaatagaattaacaaaagacattcaagatcaacataaaaacttcgtcgtttcaaacataaacagtcattgcttacgcatcgctgtatttactggtgaatatgattggcactatcattctaattcggatgaattatttattgtgctagagggagagttacttattgattttgaagatggagaaacggcggttttaaagccaaatgattctattttaattccagcatgtacgattcatagaacgagagcattaaagaggacggtaaatctttgttttgaacatatagaggctgatacgattatagtggagcaattatgaaaaaattatctgtagccgagtatagaaaaatcattccgattttggaaagtaatacaagaacgacgacatttgcttatgcggtatgtgatcaaatggtagatggtgaggtttttgccaacgagaagttaacagcaggattaattcgtacagttaacggtatctattatttatttggtcatacggatgatcaaaattataatgaagatttattgatgtatttaaaaatggctattgaaaaaacagagaagagatttacactattcgcttcaagtgaagagtgggaaatgatgattgaagggtgttttagtaatgtacttcggaatatgccacgaatgaaattccaaagagaaatctttgaagagcgaacacaagatgcaaataaaaatacatatgcagtgaagcgtattgataaaagtgatatagaacgaagcagtgaatttacagaggagtactacaaaggatattggggatcaaaagaaacgtttttgaatagtggttttggattttgtatagaacaagatgggataattgtagctgaatgtgtctcaatatttagcgggaatggttatgctgaaatagatatcgcaacacatgaagcatatcaaggaaaaggattagctcaagctgttgcgacacggttcgttgagcattgcatgcaaaatgatattacaccgtgctgggattgttatgtagacaatattccttcgcaaaaactagctagtaaattaagttttcataatccgatagaatatagattgtttgtaagtaagaaaacgggggaataaaaatgaatgtggaattaacgagatttaaagttaagcctggtaagagtcatcgagtagatgaatggatgcagcttcttaatgacaatatgaaagaagtccttttgacattaaacgacgaaaagatgtacgttgagacaattttccgggaaataagagatggagaagagtacttatattggtattctgtgcaaggagaaggcggggctcttgtcgaaaattctcattatgaaatcgataaaaagcacttagcgttttggtatgaatgtattgatgaagaagcaatgtctattgatatgaaaacagaagttgttatgattcaagatgttgtgagggaagcgatggagtaatagagtaatattttgtgaacaaaaaacagtcttatttttttgctgaaatatatattattggagatgctataggatgagaattagtaataaatatatcactctcgatgaaatagagataataagagaatccttaaataaattgcatgaatatcataataataaatcaaaatatttttctggcgattacccaagaatgacatttgaggaacgtattgaaaattataaaaagaactcaaagtacggagaatatagaattgaattattgattgagtcagaaacagataatatattaggattttgtatagcgtatagtaaaagcgtaagcggaaagattgaagttttatttgttgatgaaaaataccgaagaaacggatttggtttgaaattaatgaatagtgcagtggaatggtttaaagtgaaaaagatagatgaaattgaattaacagtagtgtatggaaatgaagctgtatcattttatgaaaagctgggattttatcctcgttcaattattatggcaactaagtcataacgatagtatggggagagatgagtgggagtttttgtttcaaaaaaatggttcatattttactaaattatatgtgaagagcacatcaaaataaatgtgctttttattatggaaaaatttataaaagctgtatttggatatctttaagtgaaaataaagagggatatcgagaatattttaggataaactataaagtgaaactttaatcagtggggggggcatcccctactgattatcagccctcaccaatcgggcttttacgagcagtccgcccccccctaacttctttgcttccgctgaattttgatgtgggggtcttactgcctgttaatgcgggataaagaaataaaaaacaccaaaacaaaagacttaccaatatacggtgtagtcgtaacaggaaaacagaggatttacaaagtttacaagggtcaccgtatattaaggctgctgtaagaggtgtaacagttgagaaatattgattacgagtaattaatgtgaataatcagaaaacttatgttataatatgggaaaaggaggtttatatgaggcaaatacatggagcaatttatatttacataacaatgtttttcgtggcgatatcctatggattggggcacgtgtattcgcatcctatactaacttttttaagcggagcatgtatggcgtttgcgcttcttgtccaccttttctcagtttggatcgtgaaatttcaattaaatattagtgaaatagaagaaggcactttctaagtggccttctttttttaataatattttggaaggtcttgcagcaatttttcaattttgcattcggtttcttcacatatagacagtgtgcgtagtcggaaaaacaaactacgtaagaaagattttatatttccgtataggtactcgtacgattcagtatgtaatgtctgttttttgacgggtaattgagctactaattcatgaagggctaataggagtacctcttcctttagaccattttgtagcattgcgacaatcggataaacgagacgttcgtcttcttcatatttgtagtaaatagaatggacacaaactttgtttaataaagtttgtaatatttcttcgtaatataaagtttccagtttaggactacgaacaagcgcctcaaatgtatcagaagcgtgagcgatactatgtgcccagccgtggtcttgcacatatccgcggaaatcatgctcgttgttcatatataacactaatcgatcttttacatgtaaaagatcagcctgtgataagaaattatgatttgtatcggcatcaataatgagtgcaattaataatgttgtaaatgcacgggtaaataccgcatcttcgtcatccgaatgaatcttatacaataaatatttgtcactgatgctttctaataatagtttctgtaattgtgtgtgtgaaaggtagtcctttttgatgagatggtaaaaagtagagcaaataagtttgtcccttaaatagctatcggtaacaccgatatgtttaagcatattggaaattaaagaatccatgttaattgtatccattacgtaatgattattacgaatttcttctaactgttgttgtaacatataaaccacctattttagaaaattctgtattttaatagtataataagaggaagaaatagacaataaataaatgcttttgaatggaggggggcattatgaagagagcattattctttttcattagtattttctttttaggaagctgttccatttcgtatgttactttttctagcgagagcaaaagttggactggacaatataaagggcatattaaggatgacagtgaagatgggatgtttacgtttcaatataagggcggggatggaaagacagaatttaaaaacttagagattgctattaatggagcctttagtacaatgacacaaacgtcagaagttcatagaggagcaaagattgaaatgaagtcttcttgtgtaagttgcgcgcctatctctaaagatgaacctatagaagttgtgattaaatgggatgataagtatgaggagaagatggtgctaaatttgaaatagtagagaaatagaaaaaggcagcaatcccgctgccttttttattattttacaaattgtaattctttcgggaatttcgttaaaatttctgatccgtcttttgtgatgtaaatatcatcttcaatacgaacgccacctacgtttggtacgtaaatacctggctcgattgtgaagaccataccttcttttaatggagactcgttgccagcttttacatctggatattcgtgtacgctaattccaagtccgtgacccaggcggtgtgggaagaagtcaccgtaacctgcatctgcgataacagaacgagcagcgttgtcgattgcgccaagtgtaacacctggtttacatgcttcaactgcttgtagttgtccagcaagtacagtgttgtaaatgcgagtttgctcttcagaaatttcaccgaatgctactgtacgtgtaatatcagagcaataaccatcaatgattacgcctaaatcaaatagtacgaaatcgccgcgtttcattttgtttgcgccaggaataccgtgtggaagagcagagttcgcacctgctaataccatcgtatcaaatgacattttatgtatgccttttgtttttaattcgtgttcaataattgctaatacttctagctcgctgcggttttctttaattgcatttacaccaacttcaacagcatagtccgccattttagctgcttcgcgtaaaatagaaagttctttttcatctttaattaaacgaagttcgcgaactttctcctcagctgatttgaaagctgcatttgggaataatttcgttaattcttcgtagcgctctacgtttaaatgttctttttcaattgcaactgcatttgcattgatgccgcggtctttaattgcttttgcaatcatatcccatggtctgtcagtatcagtaaatccgataatttcatgtgcccagccagcgttacgcgcttgaccttcttccattttagggcaaattaaaataggttctttttcttggaatacaaacataccaagtaatctttcgtgtggttcacagtggaagtttgtcatgtagaagacgttcggtgtagaagttaagaacgcagcttctacgtttttttcttttagccattgcattaaattttctaatctagcattcatcgattggcacccccgagatatttaattacaaatataactttaactcggaagaaagtgttatgacaagtaaatagatgttagaaaagacagggaattgaaaaatcatgtagaataaaaagtgagaatgtgaataggggaggaatgtaataatgaaagtatcttatcatggacattcagttgtgaaaattgaggcgaatgaaaaagttattttaattgacccgtttttaacaggtaatccgaaaacagatttaaaagctgaagatgtaaaagtggatgcaatccttttatcgcatggacacggtgatcatgttggagatacagtagagcttgcgaagaaaaataatgcagttgttgtagcgccatttgaactagcaacatttttaagttggcaaggtgtaaatacacacccgatgcatattggtggttcacatgaatttgacttcggaaaagtgaagtttacacaagcattccacggctctagttatattgatgaagaaaataagacgattacatatacaggtatgccagcaggtattttatttacagcagaagagagaactgtataccacgcaggagatactgcactattctctgatatgaagttaattggggaattaaataaagttgatctagcatttttaccaattggtgataatttcacaatgggaccagaagatgctgtactagcggcaaaatggattaatgcgaaaactgttgtaccgatgcattacaatacgttcccagttattgaacaagatccatatcaatttgtagaaaagctacaaaattgtacagggaaagtattagaagctggagaaagtattacactatagaaaagaaacccttcatttgaaaagaaaagtgaagggtttttacgtgtgtaggacagcttttaatacttgtatttgttttggtgattcttttcttttggtacgtggctgctcaggtgtttcattcaattccattgtaacttttttcccatctacgaaagctaaaaatacagcacctacaacctctaaaagttttttcatcatgtgttcgctcctttgttttatttcttgtcttaattgtataggtaatcaagtgtgcgaactatcgaatgagatgacaatagcattacattgttgtaatagaatgactggtggaatgtaagagtcattttgttataaaaaaaatagtacaggtatgcaaagagagagtgtaacagttttgaaaatatagtatactgaaagtacaacacatgaagaatttagggaaaagaaagtatggtgaaaccatttggctaccaagcataaccaaattttagaacatattaatagcctgccagtaggccataaaatttctgtaagacaaattgcgaaagatttgagtgtaagtgaagggaccgcttaccgtgcaattaaagatgcagaaaataaagggtatgttagtacaattgaacgtgtcggaacaattcgaattgaacaaaagaagaaagagaatatcgaaaaactgacatatgcagaagtcgttaacattgtcgacggtcaagtacttggaggcagagaaggactacataaaacgttaaataaattcgtaatcggggcaatgaaattagaagcgatgatgcgctatacagaagctgggaacttacttattgtcggtaaccgtacgaacgcacatcaattagcgttagaaactggagccgctgtattaattacgggcggatttgatacggaagatcatgtgaagaaattagcagatgaattaaaactgccgattatttcaagtagttacgatacctttacagttgcaacgttaattaaccgtgcgatttacgatcagcttattaagaaagaaattgtactcgttgaagatattttaacgccaattgaagaaacgttatatttaaagccaaatgatacagtgcagcaatggcatgcctataatgaagagacgatgcacggaaggtatccgattgttgatgaaagtaacaaagtgctaggaatcgtgacttcaaaagatatgatcggtgtagcgaaagaaacaccaattgataaagtgatgacaaaacacccaattacagtgaacggtaaaatgtctgtcgcagctgcggcacgtatgatggtgtgggaaggtattgagttacttcctgttgttgatgaaggaaataaactacaaggtattattagccgtcaagatgtacttcaggcactgcaaatgattcaacggcagccacaagttggagaaaccattgatgatattgtaacgaatcaatttatgacgccgaaagaagcgaagaatgagcatctatatcaattttcggtgacgccgcaaatgacgaactcaatcggaacgttatcgtacggtgtatttgcaacaattgtgacagaagcgacaaatcgcgtcattcgtgcgcaaaagaaaagcgatttaattgttgaaaacttaacgatttatttcgtaaagccggttcaaattgataatgttgtatctgttcatccgaaagtattagaaattgggcgtaaatttggtaaggtcgatgtagaggtgcatcatgaaggtaatgttgttggaaaggcattacttatggtgcagttaatcgataaataaaaagatggaacaaatcgttttgatttgttccatctttttttgttgttttaaatttgaaaggcatgattttagatgggagttttagtgaaatatgtatggagtggagtggaaaagtaacgtaagaaaagacagaatagtaattcaatttagttgtatattgtgttatgattatattgtaagaaaatggaattctgaaaggtggtatgcattatgtcgtcagccgtactcttttttggtagtatcgcactattttactttcttgtaatgataccgatccaatatttatatttacaaggtttacatgaaaaaaaggaaaagacaggattatctcagcgagagctatatgaaaaaatgtcttttggagaagaacaactacattttcatgtacaaggtaacccatttaatataccatctgcgtttgttgcatatatgattttgaaagttaagggacgtaaaaaagcatcacaatattgatgcttttttatgttgcttcatagacttcggcttctttaactgctaatggcaagaaatgtttgtattggcgaaacccgttaaatacacttgcactaccaaatagaacgaataaaacaccaacgataatacgagcggttgaaagttctaaaaagaattggtttatcccgaaaaataaaacgaatgaaccgagtgccattgcggattttcctgagagccaacctttctccattgggcggtttgtacgaaagtattttgttttgtaaaagaggtacaacataaatgagatgataatacagaagactaatactggcatagtgaacactcccatcgctttgtgaaaaataatagaaaagaaaaagaaatatctaaactttctaacttttattataaagcaattgttcgcatgaatgaaatactttccgttataatggaggataaagtgaagaagttgattaaaaaggagattatacatatgcatgagcaaattttaggagcaattaaagagtttgatacaattattattcatcgccacgtgcgtccggacccagatgcgttaggttcacagggtggtcttggtacaattctacaagaatcgtttccagagaaaaatatttatacggttgggtacaatgaaccgtcactagcatacttacgagtaatggatgatattgaagatagtgtatacgaaaatgcgcttgttattgtttgtgatactgcgaatcaagaacgggttgacgatcaacgctatacaaaagggaagatgttaattaaaattgatcatcatccaaatgaagatccatatggagatattacgtgggtagacacgacagcgagttctacaagtgaaatgatttatgagttttataactatggaaaagataaaggattaaaaataacaaaagaagcagctcgccttattttagcaggaattgttggagatacaggtcgtttcttattcccaaatacgacagcaaaaacacttcgttacgtaagtgagcttgttgatatgggtgtgaaattcacagatttatacaatgaaatgtataagacaaaagaaaaaattgctcgtttaaacggttatattttacaaaactttacgatggtagaagaaggagcagcttacattaaattaacgaaagaagtattagaagagtttgatgtacttccttctgaagcatctggtgttgttggagcgcttggcaatattgatggattaaaggcgtgggttctatttttagaggaagatgacgtaattcgtgttcgtcttcgttcaaaaggaccagttataaacaaattggcaatgcaatataacggcggagggcatccgatggcttctggtgccaaggcatcttcttgggaagaagcggatcgtctttttgctgatttacgtgagatttgtaaataaaagactatatgttagaacgaaaagaaggagcggcgctaaagccctccttctttatttttctttctctatagtaatgctaatttcaagcactgtatcaaaagatattgtatcgactttaaaacggtataggcgatcgtaatgtttgtatgttttattttcgattaccttttttagtaggtctttattttttgcgatactttgaatgtttttcgttaaaagatgctggagatcattatgaatagatgtagtcatattttcgagtgtaagattgtctaaatcgtatttttctcgattgataagttttattttaatctcttgaatggttaagagccgtttattttcagtgttcaatttttcttgatcttcgagaaggacgtggagctttgcttcttgtttttctataatttctctttgttctgctattttactagcttgttcttgttgaaaaacaccgtatatgtacaaaaaaataaaccagctcaacacgcctccaacagcagcaccagctaatactaagtaccatctttttgctgtattggcacttggtactctcatacatgttcctgcgttagccatttaataataatgagacctgtttgcataccaccagttgcgaaaaaaataaggagaatttgttttacgatatctttcatatctccgccaaagaaacttctttcaaagctataaaaggtatcgaatgttccgccgattgctgcaacgagtgcccaaattcttaaattttgggcgaattgattaatgtaagttagagctggttttccgataagaaacgcaccaaatccaccaattaatgaaccgccaagtataaccccaaaggcaataaaataactaataataagcagagagaaaaaagtatgttctcttacatccatcgtcattcccctttcttcttcatatatatggacaaagtataagaagtatgttttgatttccgctttcctcatcacctataataaaagtagtcaaataggtaaagagagggtacaacagtgaagtttgtgcatttacaatgtcaaaccgtttttagtttattaaaaagtgcttgtaaaattgatgagcttgtagtcagggcgaaagaacttggtttttcatcgctagctattacggatgaaaatgttatgtatggtgttattccgttttataaagcatgtaagaaacatggtatacagcctgttattggattaaccgcttctatttttagtgaagaagaagaaaggtcttatccgcttgtattacttgctgagaatgaaataggctaccaaaatttattaaagatttctagcagtattatgacaaagtccaaagaaggtattcctaagaagtggcttgcgcattatgcgaaaggattaattgctatttcgccaggtaaagatggcgaaattgagcaattattactagaagacaatgagagtcaggctgaagaagtagctcgcacgtatcaaaatatgttcggccatttttatatgagtttgcagcatcatgcaattcaagatgagttgcttttacaagagaaactacctgaatttattagtagggttaatattccagtcgttgcaacaaatgatgtgcgctatatcaatcaaagtgacgcgcttgttcacgaatgtttactatctgttgaaagtggaacgaaaatgactgatccagataggccgaggctgaaaacagatcagtattatttaaagtcatcggatgaaatggaagcactattttcccatgcgccggaagcaatccaaaatacaataaaaattgcagagcgttgccaagtagaaataccgttccatgtaaatcaacttccgaagtttcctgttccgtctaatgaaacgagtgatatatacttgcgtcgtgtttgtgaagaaggtttgcggaaacgatatggtgaaccgaaagaagtgcatataaagcgtttggatcatgaattaaatgttatttctcgtatgggatttagtgattatttcctcatcgtatgggattttatgaagtatgcacatgaaaatcatattctaacaggaccaggtcgtggatcggcagctggttcactcgtttcatacgtattagaaattacagatattgatccaattgaatacgatctattatttgaaaggtttttaaatcctgaacgtgtgacgcttcctgatattgatattgattttccagacgtaagacgtgatgagatgattcgctatgtgaaagataaatacggtcagctccgtgttgcgcaaattgtaacgtttggtacgcttgcagcaaaagcggcaattagagacattgcccgcgtaatggggcttccgccgcgagatattgatatattttcaaaacttatcccatcaaagcttggtataacgttaaaagatgcatatgaagaatcacaatcacttcgtgagtttatacaagggaatcttttgcatgagcgtgtgtttgaaatcgcaaaacgtgtagaaggtttaccacgtcatacgtctattcatgcggctggtgttattatgagtcaagaaccgctaacaggcagtgtagcaattcaagaaggacataacgatgtttatgttacgcaatatccagccgatgcgctagaagaacttgggttgcttaagatggactttttaggattacgtaatttaacgttacttgaaaatattataaaatttatcgcgaacaaaactgggaaagaaatcgatataagaaacttacctcttcaagatgaaaagacattccaattattagggagaggagatacaacaggtgtattccagcttgagtcaggcggtatgcgaaatgtacttcgcgggttaaaaccgaatgagtttgaagatatcgtagctgttaactcgttatacagaccaggaccgatggaacagataccgacttttattgaatcgaaacatggaaaaagaaaaatcgaatatttacatccggatttaaagccaattttagaaagaacatacggcgtcattgtataccaagaacaaattatgcaaattgcatcgaagttagcagggttttcgcttggagaagcagatttactgcgccgtgcagtgagtaaaaaaaatcgtgatattttagatcaggaacgtaagcatttcgtccagggatgtttgcgaaatggatatgatgagacgtctgctgaaaaaatttatgatttaattgtaagatttgcgaattacggttttaaccgaagtcacgctgtagcttacagtatgatcggatatcagcttgcctatttgaaagcgaactatacgctggaatttatgacggcattattatcaagcgcaattggaaatgaagataaaattgtacagtatatacgagaaacgaagcggaaaggttttcacgttttgccgccgtctcttcagagaagtggttataacttccaaatagaagggaatgcgatacgttacagtttactttcgatccgaaatattggaatggctacagtgacggcattattagaagaacgagagaaaaaaatgttcgaagatttatttgaattttgtctccgtatgccgtcaaagttcgtaacggagcgtaatttagaagctttcgtctggtcgggatgttttgatgattttggtgtttcgagaacgaatttatggaaaagtattaaaggggcgttagagtacgcgaatctcgcacgtgatttaggagatgctgttccaaaatcaaaatatgtacaaggagaagagctatcttttattgaacaactaaataaagagaaagaagtacttggcttttatttatcaagttatccgacagcgcaatatgtgaagttagcaaaagaattagaaattccatctctcgctcaggcgatgcgacacaagaaaaaagtacaaagagctattgtgtatataacaagtgttagagtgattcgtacgaaaaagtttcaaaagatggcatttattacattctgtgatcaaaatgatgaaatggaagcggtcctcttcccggaaacgtatatacatttctcggataagttgcaagaaggagcaattgttttagttgacggtacgattgagctaagaaatcataagctgcaatggattgtaaatggactatatccgctagaggaaatggatgtttatgaagaaaagaaagacgcatctgtttacgtgaaattgccatctcagtatgagaaaaagcttttaaatcgggttacgaaaatattgttcgactattcaggttttgcgaaagtactaatttattatgaaaaggaacataaaatggtacaattatctcggagtttatcgattcatccaagtgaagaatgtttaggagcacttcgtgaaattgtcggggaagaaaatgtagttgtgaaaatataatggacaatttccctacacttcgattattatagtagtagtgttcgtggtcagaccacttggagaaattgatatcagcaagaataatttgaggagagtggatagtttgtcaacacttcgtgaagaagcacttcacatgcataaagtgcatcaaggaaaattagaaactgtatcaaaagtaaaagtagaaaatgcaaaagatttaagtcttgcatattctccaggggttgcagaaccttgtaaagaaatttatgacgataaaagtaaggtatatgaatatacgatgaagggaaatatggtagcagttgtgacagatggaacagctgtacttggtcttggtaacattggacctgaagcatctcttccagtaatggaaggtaaagctgtattattcaagagctttgctggtgtagatgcattcccaattgccttaaatacaaacgatgtagataaaattgttgaaactgtaaaattaatggagccaacttttggcggcgttaacttagaagatatcgcagcaccaaactgcttcattattgaagagcgtttgaaaaaagaaacaaatattcctatcttccatgatgatcaacacggaacagctattgtaacagtagcaggtcttgtaaatgcactgaaattagttggaaagaaaatgtctgacattaaagttgtcgcaaatggcgcaggtgcagcaggtattgcaattattaaacttttatatcgctatggtgtacgcgacattattatgtgtgaccgtaaaggggcaatctatgatggtcgtcctacaggtatgaatccggtgaaggatgaagttgcaaaatatacaaataagaatcgtatagaaggttctttagctgatgttgtacaaggtgcagacgtattcattggtgtatctgcagaaggtgcattaacagaagagatggttcgtacaatgaatgacgatgcgattatttttgcaatggcgaatccagttccagaaattatgccagaattggcaaaagcagcgggcgcagctgttgttggaacaggtcgttctgacttcccgaaccaagtaaataatgtactggcgttccctggtattttccgcggtgcacttgacgtacatgcgacacaaattaacgaagaaatgaagatggcagctgtacaggctattgctgagcttgtagcagaagatgagttaaatgcagactatatcattccggcaccatttgacgcgcgtgtagcgcctcaagtagcggcttacgttgcaaaagcagcaatggagacaggagtagctcgccgtcaagtagatccaaatgagatcgctgaaaaaacaaaacaattagcgctgattggtaaagaataagcgaggaaattccattgacatcatcaaatacaaaagtatatctcgaaattgtaaaaaaaatccgttccattatggaagaggatggattggtggcgggggatcgtttgccgtctgagcgtgagttaagttcacgcttaaacgtaggacgttcctctgtaagagaagcattgcgtgctttagaactggtaggattgattgaaacgagacgtggtgaagggacgtttattcgaaacttttatgataacggtcttgtacaattaattgctccgttcttattgcaagatgagaaaacaattcgtgatttattacaaacgaaacgattactcgagaaagatatgattcgaattgtatgtaatttaccgaaagaaacgttttctaaagtgctaagtaaattacaccaagtacttgaaggaaatgaaaactcaatcccaacgcttcatcaaacgttctttaaaacacttattgaacaagtcgataattatttactatatcgcatttggatgatcgtaaatgattacgtatcaacgctttcttgtaaagtttcaagagattctatcgatatgtatagaaagctttacgctactttggaagaaaaacaagaaaatgatgcactaaaaatttacgatgaattagtagagaatatacagtttcactcgtaatgtataaaatttgtcgaaatgaccatgacacgttatgacaaacattctaccgcgtagcggttaaagttaaacgtaaagagtgaggttattagacagattgagaagataaggctaacatcaaactttggtgttagccccattttcttcttacgctaaccttagctctcaacgaagggggtcaaattgtgctaagagatttattcgtgaaaaagaaaaagtacgctgcaataccttcagaacaagtacgaaaagatgtgccagatggcgttatgacaaaatgtccggaatgtaaaaaaatcatgtatacgaaagaacttctaaaaaatttaaaagtatgtgtgaattgtggatatcatcatcctatgaatgcatgggaacgtcttgatagtatattggacgaagggtcattccgtgagtatgacaaagaaatggtttcattaaatccactcgagtttccaggttatgaagagaaactagagagcgatcgtaagaagactgaattgaacgaagcggttgtaactggtgaaggaacaattgatgacatgcttgttgttgttgcagtaatggattctcgttttcgaatggggagcatgggctctgtagtaggagaaaaaatcgcccgtgcggttgaaaaggcgtacgacttacaagttccatttattatctttactgcttcgggtggtgcccgtatgcaagaaggtatattaagtttaatgcaaatggcaaaaacaagcgtagctttgaaaaagcatagtaatgcaggaggattatttatttctgttatgactcacccaacgacgggcggggtttcagcgagtttcgcttcacttggtgattataatcttgcagaaccaggtgcacttatcggatttgctggtagacgtgtaattgaacaaacggtgcgtgagaaactaccggaagatttccaaacggcagaattcttactagatcatggtcaattagatgcggtggtgcatcgtgatgatatgagagaatcgcttcgtaagattttagaagttcatcaaggaggggaagtggctgtatggcagagctagaatttgaaaaaccagttgttgagctaagaaataagattcgtgaactgaaagactatacgaaaaacagccagatggacttcagtgaggagattcgtattttggaagaaaagctagaaaatttagaggaagatatatacggcaatctaaaagtatgggaccgtgttcaaattgctcgtcatgcagaacgaccgacaacgctcgattatattgagcacttatttactgattttttcgaatgtcatggagatcgtctatttggcgatgatgcagcgattgtcggcggcattgcgaaatataaagggatgcctgtaactgtaattgggcatcagcgcggaaaagatacgaaagaaaatattcgccgtaactttggaatgcctcatccagaaggatatcgaaaagcactgcgtctcatgaaacaagcggaaaagtttaatcgtcctattatttgtttcatcgatacgaagggagcttatcctggtaaagcagctgaagaacgtggacaaagtgaagctattgcccgcaacctatttgagatggcaggtttaacggtaccagttatttgtatcgttatcggtgaaggcggtagtggtggtgcgctaggccttggagtaggagattacattcatatgctagaaaattccacttattctgttattacaccagagggtgcagcggcaattctttggaaagatgcaggaaaagcaaaggaagctgcagaggcaatgaaaattacagcagcagatttgaaagaattaggtgtaattgatgaaattattccagagacaaaaggtggagctcaccgtaatattttgaaacagtcagaaaatatagacttaataattagaaaaacttttgaacaattaaacggaatttcgaaagatgaattaatcgaaaaacgttatgaaaaatatatgaaaattgggcaagtttcgttttcaaacgcttccattgggataaaataagaaaagcgtgcgttcctcttcgcgaatgcacgtttttattatgaaaagacacatcttctccattgtgtttttatattttttcgtgttattttattataaggcaaataatctttatgaggtgagtacaaatgaaacgtattggtgtattaacaagtggtggagattcacctggtatgaatgctgccattcgtgcagttgttcgtaaagcgattttccatgatattgaagtatatggtatttaccatggatacgctggattaatttctggtcacattgaaaaattagaacttggttctgttggcgatattatccaccgcggtggtacgaaattatatacagcaagatgtcctgagtttaaagacccagaagtacgactaaaaggtatcgagcaattaaagaaacatggtatcgaaggacttgttgttattggtggagatggttcttaccaaggcgctaaaaaattaactgaacaaggattcccatgtgttggtgtaccaggtacaatcgacaatgatatccctggaacagacttcacaattggtttcgatacagctttaaacactgttattgatgcaattgataaaatccgtgatacagctacatctcatgaacgtacatatgttatcgaagtaatgggacgtcatgctggagatatcgcattatgggctggtttagctgatggtgcagaaacaatcttaattccagaagaagagtatgacatggatgatgtaatcgctcgtctaaaacgtggtagcgaacgtggtaaaaaacacagtattatcattgtagctgaaggtgttggaagtgcaattgacatcggtaagcacattgaagaagcaacaaactttgatactcgtgtaactgtattaggtcacgtacaacgtggtggatcaccaagtgcacaagaccgtgtattagcaagtcgtcttggtgcaagagcagttgagttgttaattgctggtaaaggtggacgttgtgtaggtattcaagataataaacttgttgatcatgacattatcgaagcgttagctcaaaagcatacaatcgataaagatatgtatcaattatctaaagaattatccatctaatcggcgtaatgtcagatatttgggaacggtttcataattttcggaggtgcaatatgcgtaaaactaaaattgtatgtactataggtcctgctagtgaaagtattgaaaaattagagcaattaatcgaagcaggtatgaacgttgctcgtttaaacttctctcatggtagccatgaagagcacggagctcgtattaaaaacattcgtgaagcttcaaagaaaactggtaaaacagttggtatcttacttgatacaaaaggtccagaaatccgtactcacgacttcgtagacggacaagctgagcttgtaacaggtgcagaggtagttctttctactgagcaagtattaggtactgcagagaagttctctgtatcttatgctggtctttatgacgatgtagacccaggttctcgtattctaatcgatgacggtcttatcgaactagaagtaatcgaaaaagctgatggaaacatccgtacaaaagttcttaacagcggaactgtaaaaaataaaaaaggtgttaacgtaccaaacgtaagcattaagcttcctggtatcactgaaaaagacgtaaaagatatcatcttcggtatcgagcaaaaagttgatttcattgcagcttcattcgtacgtaaagcgtctgacgtattagaaatccgtgaattattagaagagcataacgctcaatacatccaaatcgtaccaaaaatcgaaaaccaagaaggtatcgacaacatcgattcaatcttagaagtttctgacggtttaatggtagctcgtggtgatatgggtgtagaaattccaccagaagaagtaccgttagtacaaaaacgtctaattaaaaaatgtaacgtgttaggtaaaccggttattactgcaacacaaatgttagattctatgcaacgtaacccacgtccaactcgtgcggaagcaagtgacgtagctaacgcaatcttcgatggtacagatgcaatcatgctttcaggtgaaacagctgctggacaatatccggtagaagcagtaacaatgatggctaacattgcggtacgtgttgaaaaatcattacaatatgaagatatgttcaaaaaacgtattaaagagttcactccaacaattacagatgcaattagccaatctgttgcgcatacagcacttgctcttgatgtagctgcaatcgtagctccaacagaaagtggatatactgcgaaaatgatctctaaataccgtccaaaatctccaatcgtagctgtaacatctgacgagcaagtaggacgtcgtcttgcacttgtttggggtgtacaagcatttatggctgagaagcgcgcagcttcaactgacgaaatgttagatacagcaattcaaacaggcatggatgcgggtctaattggacttggagatactgtagtgattactgcgggtgtaccagttgctgaaactggtacaacaaacttaatgaaaatccacgttgttggtgaagaaattgctaaaggacaaggaattggtcgtaaagctgcaaaaggtaaagtagttgtagcaaaaacagctgctgaagctgtagcgaacgtaaacgaaggtgatatccttgttacaacaagcactgataaagatatgattcctgcaatcgaaaaagctgcggctttagttgtagaagaaggtggcttaacaagccatgcagctgttgtaggcgtatcaatcggtattcctgttatcgttggtgtaaactgcgtaacagcaactttaaaaaatggccaagaagtaacagttgatgcagcacgcggaattgtttataatggacatgcggaagtgctataagtaatacggagagaaggatcggagtccttctcttttttttacacaaaaacgagatagaattagcttaaagcgcctagaattgcttttaaaagctgtttgttatgtgttttaatatgaaagagtatctatatttcatatgatgtatataggcgttgtgaggacgttaaaagtgagttgtgagagaggtgtagaactatgaagtggttactattcttgtttattttaataccggcgattgagattacggtcttaattggatcaagtcatgtaataggtttatggtctacgttcgctatgattgtatttacaggtgttgtaggtgtgtatttggcgaaaagacaagggtttaaagtgcttggagagattcaatctaagttgaatagaggggaaatgccaggtgaggcggtactagatggtatttttgtatttgtaggaggtattctcttagtgcttcctgggtatgtgacagatgtgctagggtttatctgcgtgatccctattacgagagctttattgaagccgtttgttatgaagtggatggaatggaaatttagaaagaactctactattattattcagaaatagcacttagattgtagaaatctaagtgctattttttgtgttgtaagaggagaggaactttctggttgaagctttgctttgccgcgctatttgtggggtggaatttctatctcaaagctgggctgctcgtaagtgtctggtgtggggcgaatgatgagtggggatgaacaaaacgttcgcttattatatgtgctatataattttcgtttgaattcttgtgtgtacttcgattaaacttgtgattttttagtgctattaatttagatgaataagatggagggaacgctgctgaattaaatttttgctttctcatataaaggaacgattggtgtaaaaaattcatataaaaaggcggagattgttagttgaagtcttgttttatgctattttgtatatttattcatttacataaaaagtaataaatgtaaatgataattataaaataaatagaataaatatgtaaaaacaccacgaaatatgcgtttttcatgcaaaaaaacaagagaattatcttttttgagtgcaattctcttgttttatgtaatgagtatgaaaaataagtacaaggaataatcagtgggaaattcccactgattacatgtaagttttttgttgtgtatgaattagaaactattattttgaaggtgaacctttaatatatttccacaagtcatggaagacattagctttgtgtaatgtattaagtagtactaaggtgactgggccgatgattaatcctaaaaagccaaaaagtttaaagccgacaaatagagcgacgagtgttgctaatggatcgagaccgatgttagatgaaagtactttcggctccataatttgtctttggacaatcacgacgatgtataaaatgagaagaccaatggcgaatgcggtatcgccagtgaaaaatacgtatataacccatggaacgaagactgcgcctgttcctaagtatggtagtaaatctacaactcctgtaataatcgcaatagtaatggcgtatggtacgcgtaatattaaaagtccgattagtacaatgacggttgtcatagatacgagtgtaagttgtgctttcacaaaaccaaacaaagcttttcttaagtcgacaaaaatagtttttccatagccatgtacacgattcggtagcaattttcttgctttctgagcaagacggtgccaatcgtaactaatgaagaaagtggctaataaaatgaatacaagaacagttaaagttgttggcagtgcactaatgaaattcgttaacccgcttataatggcggttaaaagttctttcatttgtgttgttgcttctgttcctaagttttgaatgttttgtgtaattgtatagcgctgtggttctccaagatgattaaatttagagattaaatcatcgtagagaggcataatatgattaagtgcaaattgctgagcgaatgtaacgatatctggaaactttactgtaacaagttgtagtaagtatgttgtggcagatattgcttcagtcacaagatatgtaacaagtccaacgatagctccaaatacgagaattaagctaacgagtactgctagtgcgcgaggaaattgtagtttttgattaaggaaattgacgacaggattaatcaaataagcaaatgcaaaagcgataataaaaggatagataagccctgacatgtatagtaatacatagaacccagctaccgttgctacaatgacaaatatgagtcgcaatatcatatatagtaagtttcggttcaaagatgtatacctcccattccaatttggattatcctaattcgttcaacttataacgagtgtgctccactgattaaagtttcactttaccccgcattaacgggcagtaaatctcctacccgaagtgcggctggatcaaaggagttagctggagataaactgcccgtaaaagcccgattggtgaaggctaataatcagtggaaaatgccccactgattaaagtttcactttatgttatagtggaatgatggatttttcctgctttttcagtatatgagtgactgtgaaagcttggtgttgatgcttctactatatggtaaaaacttcattttctcttctttttattttacctgtttctaattagaaaagaaagaagagacgcccgttttttaaaatgtatacatgcttaaattttgatggtgaaagtctcagtttgtcattttaaaatacataaaaaatgaagtaattcatgttgaataggcatcgatatagcatgtataacgataggtttaaaggtatttttgtttggaaatgagttcattattttcagaaaggaagtgcaaacatgattagtcagtcaacgttatttttattcatactacttattataggacttattgctaaaaaccaatcgcttactgtagctattggtgtgttatttttattgaagtttacgtttttaggagataaggtctttccttatttacaaacgaaaggaattaacctaggtgtaacggtcattacaatagcggtgctcgtaccgattgcgacaggggaaataggttttaaacaacttggagaagcggcgaaatcttattatgcgtggattgctttagcttcaggtgtagcggtcgctttgttagcgaaaggcggcgtacaattgttgacgacggatcctcacattacaactgcgcttgtttttgggacaattatagcggttgcgctatttaatggggttgctgttggtccgttaattggggctggaattgcctatgcggttatgagtattatacagatgtttaaataaggaattttatagtaatataaaatttttgaattctttctgttcacaaaagtcagataattgtttataataggattagaaactttgaaaagttacataacagcagagactttacaccagataaaataaaaacaacataaaacaattttataatgatattgttttatgttgtttttatcataaaactcttcggaatgtattttcctcactaacttgttgttttgagcgtgaggattcggggagacattcacgctcatgctttccatgtaaacaatggacaataagaggggaacatcgcaacaaatttgcatgatcgtgcattttgcttgcctaaagagtgaacgggcgttcataattcataaggggagcaaatagatataaggagcaagattgggagaattttcaggaaaaggagagaatgtcatgactgttattcgaggtttagaaggggtagtagcaacaacatcatctgtgagctctattattgatgatacattaacttatgttgggtataatattgatgatttagctgagaatgctacgtttgaagaagtagtgtacttattatggcaccgcaagcttcctaatgaaaaagaactagcggaatttaatgaaattgtatctgaatactataaagttccaggtgagattttaacatatttgaaacaagtagatttaaaaattgcacatccgatgtctgttttacgaactgcaatttccatgctatcattatacgatgagagcgctgaaattatggatgaaaagtccaattatttgaaagcggttaaattacaggcgcaagtcggaactttagttgctgcttacgcgagaatccgtaaaggtttagatgttgttgagccaagaaaggatttatcattagctgcaaacttcttgtacatgttaaatgatcgcgagccaaatgaagttgaaattgaagcttttgataaggcgcttgtacttcatgcagatcatgagttaaacgcttctacatttactgcacgtgtttgcgtagctacactttcagatgtatattctggtattacagcagcaatcggtgcattaaaaggtcctcttcacggtggggcaaatgaaaatgtaatgaagatgttaactgagattggtgaagaagaaaatgtagagtcatatattcataatgctcttcaaaataaagtgaaaatcatgggctttggccaccgtgtgtatgagcagggtgatccacgtgcaaaacacttacgtgaaatgtctaagagattatgcgtgcttttaggagaagagaaatggtataatatgtctatcaaaattgaagacattgtaacaaaagaaaaaggtcttccaccaaatgttgatttctattcagcttctgtataccattgtttaggaattgaccatgacttatttacacctatttttgcaattagccgtatgtcaggctggttagctcatattctagaacaatatgaaaacaaccgtttaattcgtccgcgtgctgattataatggaccaacgcatcaagtgtatgttccaattgcacaacgataagcgaataacactattttgatagtgaaaatacgctttcaaaagtctgattttttcggaaagatgtaatgattagaatattttaatttgactaacggtttgaactgaggggttattccctcagtttcatacatatgaaatttcaaacatgggggttatcacattgacgacaggtgaaaaaattactgtaactaatggtgttatgaatgtaccaaacaatccgattattccatttatcgagggagatggaattggtcctgatatttgggcggctgcatctcgcgtactagaagcagcagttgaaaaagcttatgatggtgagaagaaaatcgtttggaaagaagtgcttgcaggggaaaaagcattcaaccaaacaggcgagtggttaccagaagaaactttaaacttaattcgtgaatatttaatcgcgattaaaggtccacttacaactccagttggcggtggtattcgttctctaaacgtagcacttcgtcaagaattagatttatatgtatgtctacgtccagttcgttattttgaaggtgttccttcacctgtaaaacgtccggaagatactgatatggttattttccgtgaaaatacagaagacatttatgctggaattgaatatgcacaaggatctccagaagcagaaaaagttcttgctttcttaaaagaagcaatgggtgttaataaaatccgcttcccagaaacatctggtattggtattaagccgatttcagaagaagggacaaagcgtcttgttcgtgctgcaattcaatatgcaattaacgaaaaacgctcttctgttacattagttcataaaggaaacattatgaaatttacagaaggtgctttcaaaaactggggttacgaagtagcggaacaagaattcggcgacaaagtatttacttgggctgaatacgatcgtatcgttgaaaaagatggtaaagatgcagcgaataaagcgatggcagacgctgaagtggctggaaaaatcatcgtaaaagattctattgcagacatcttcttacaacaaattttaactcgtccacgtgagttcgatgttgttgcaacaatgaacttaaatggtgactatatctctgatgcacttgctgcacaagtaggtggaattggtattgcacctggtgcaaacattaactatgtgactggacatgctatctttgaagctacacacggtacagctccaaaatatgcaggtttagataaagtaaacccatcttctgttcttctttcaggtgtattattattagaacacttaggatggaacgaagctgcgaaattagtaactgcttctgttgagaaaacaattgcttcaaaagtagtaacttatgatttcgcacgcttaatggaaggtgcaacagaagtgaaatgttctgagttcgctaatgaacttattaaaaacatggatgtagcgataatcaaaaacgcataattaaagcgggggggtaaattatgacaatcaaacgcaagaaggtttcagtcatcggtgcaggatttacaggagcaacaacggcattcttattagcacaaaaagaactggcagatgttgtattagtggacattccacaactggaaaatccaacaaaagggaaagcgttagatatgttagaagcgagcccagtacaaggttttgatgctaacattattggaacatctgattacgcagatactgctgattctgacgttgtcgttattacagcaggtattgcacgtaagcctggtatgagccgtgatgacttagtagcaacaaactctaaaattatgaaaagtattacgcgcgacattgcaaaacattcaccaaatgcaattattgttgtgttaacaaatccagttgatgcaatgacatattctgtatttaaagaagcaggattcccgaaagagcgtgttatcggtcaatcgggtgtattagatacagctcgtttccgtacattcatcgcacaagaattaaatctttctgtaaaagatattacaggatttgttcttggtggacacggtgacgacatggtacctcttgtgcgttattcatatgcaggcggtattccgttagaaacgttaattccgaaagagcgtttagaagcaatcgtagaacgtacacgtaaaggtggcggtgagattgtaggcttattaggaaacggtagtgcatattacgcaccagcagcttctttagttgaaatgacagaagcaatcttaaaagatcaacgccgtgtattaccggctattgcgtaccttgaaggtgagtatggttatagtgacctttacttaggggtaccagtaattctaggtggtaacggaattgaaaaaattattgaattagaacttcttgcagatgaaaaagaagcgttagatcgctctgtagaatctgtacgtaacgtaatgaaagttcttgtttaataattgaatagtagtgaaaaagattcgggattccgaatctttttctactatttaccgaattgtttttttgaaataatatgaaaacgctatcatttgtaatatcctataatgaaactgtagatttatactatacattgccctcatcatagtaaatttcggataaggtatcgcttttagtaggataataaggtgaaaaaatcggagggggttgtaacatgttaaagaaaaaagttcaaattggtcgtaaaatggatgaaattacagtaggagagaaattatctatcactgaaaaaattgaggataaagatttgttattgtacttagggttaacgaatgatgccaatccattatatattcagcatgattacgcatcccaaactccgtatgaaaagccgattgtaccaagcattatgctaacgggaatgattacaacggcggttacgaaatatttaccgggtccaggaagtcatattacgagaaaggaccttacattcgtgaaacatgttcaccattatgaaacgttacaaatccactttgaagttgtggctgtttctgaggaggaacatacaattgatatgcttgtatctgctcatgatgaaaaaggagaaactgttgtaaagggttcattaacagtaacgccaccttataaatctgtttccattatggaaaaagcattagataacttttaaaagatgaaaataaaaatagcgctagcatacctttaataaggatgctagcgctatttttagttgaaaaacccttctttgaacccttcagcaaattctgagcaacccgttttaatcgtatcccagctaggagcgttaaaagcaaggatacatgtgattgctaaagatagaatggatagtattagtcgcataatagacctccgaatattattaatttatatattaagattaataatattattatcggtaattgaagtcaattaaaggagtgattttttaggtgaggtggaaaagagaagacgcgatctttgaaacggtaagagaagctgaagtgtgggcagacgggtttgtgaatgaaatgtacgggagagtatttgatggatatgaaacaccagattataaaatagcgtatgctttatcttttctcttagcgcaaaatcgagaactcaatattcatacggaagtagaatttaataacgatatggaagtatataaagtatggataacaaaacataattgaggcgaacgtaattgtttttaggaataacaatagcacaatccgaatccatgaatagacaattatattgagagggaccttgttttctagtatgatgagaataacggggaaaatactaggatgaagaaggtttcaagtctataacttggaggaaaagaatgaacaatcgtattttagtagttgatgatgaggaatttatcttaactttaatcgaatttaatttacaacaagctgggtttgaagttataacagcgatggatggagaaatggcgcttcaaaaagcgacaacagaacgcccagatttaattatattagatttaatgcttccgaaaatggatggtatggaagtgtgtaaagaattacgattgcagcgcgttatgacgccgattttaatgttaacggcaaaagatgatgagtttgataaggtgctaggccttgaacttggggcagatgattatatgacaaagccatttagtccaagagaagtagttgctcgtgtgaaggcgattttgcgccgtacgaaattacaacaagaagaacaagttgcagaagcgccagatgaagatagcatcacaattgcagaacttaaaattttaccggagttttatgaggcttatttccaaggaagaaagcttgaattaacaccaaaagaatttgaactacttgtgtatcttgcgaaaaataaaagtcgcgtgttgacacgtgatcaattattaagtgctgtatggaattatgattttgctggtgatacacgaattgttgatgttcatattagccatttgcgcgataaaattgaacaaaatacgaaaaaaccgacgtacattaaaacgatacgtggtttaggatataaattagaggagccaaaagggaatgaataaatttcgttccaggcttctttttacatttgtttctcttattgtatttattttagttggactaggtttattactagaaactgtgtttgaaaactactatatagatcatgctaaagagagaatggtaaaagagacggagtatgttgcgacgttagcagaagagcaaggttttgataatgtcttaaaaaatccatacgtatttgaaaagttagaagaaaaaataccagcttctatcgtatttttggatgaaaaaaagaaagttcaatatagaaaaggacaagaattggcatttagtccagagacgattaaagaactttcttcggaagtggcaaaacaacgaagtaaagtaattacgaaagaaacggatcgaaagaatgaattttatcatgcggtgttcgttcaagatgtagaaggaaaacaaggatacattttggtgaaaagtataattgatcctttaagagacgtacatcaaaaaacgtggggattattaattatcggatttgtcattgcttgtctcgtagttgtatttttaggtatgaaaattacagggcaatatattaggccaattgaatcggttacgaaagttgcaattgaattggcaaagggtaattataaagcacgtgcatacgaaagtcattcggatgaaacaggaatgctgagtaaagcgattaatattttagcacgaaatttacaagagatgacacttgaacaagaaatgcagcaagatcgtctgcatacgttaattgaaaatatgggaagcggaatgattttaattgatagccgaggatatataaaccttgtaaaccgctcttataaggaaactttccacgtaacagatgaagaatatttagatcgcttatattatgaatcgtttcatcatacagaaattattgagcttgtagaagaaatctttatgacagaagtgaaagtgcgtaaacaaatgttattaccacttggaattgaacggaagcatttcgaagtatatggagcgcctattatcgggacaaaccatgaatggaaagggattgttctcgtattccatgacataacagagttaaagaaattagaacaaatgagaaaagactttttagcgaatgtttctcatgaattaaagacaccgattacttctattaaaggtttttcagaaacactcttagacggagcgatggataataaaaaattctgcgaacatttcttgcacattattttaaaagaaagtgagcgcatgcaaggattaattgaagatttattagatttgtcgaagatcgaacaacaaggatttaaattaaatatgggaaccgttgacatgaaggggctgcttgaagatattcatatggtgcttgataataaagcaggagaaaaagaaatctctttacaagtgaatgtattaaaacgtgcctctgttattggagatccaagtcgtttgaaacaaatctttattaatttaattaataacgcaatcgtatatacaccggctggaggcgttgtttcagtagagttagcggaagataaatataatgcttatataaaagtatcggatactggaattggtattagtaaagaggaaattccgcgtatttttgaacgtttctaccgggtggataaagcaagaagtagaaatactggtggtaccggccttggattgtcgatcgtaaagcatttagttgaggcgcatcaaggtacgattacagtagatagtgaagttggagaaggaacaacgtttacagttgttttaccgaaatcagcaactgaaaaataggatgaaggatgtttacaatatattaacaatggcttaattaaatattaataaagctctgttaatataatacatgaaaaccccttcatccaaggagtaattttggacgagaatagttaagctgttctcgtcacttccctttatgccaatataagtctgttttatatatgaaagaaaatagccgttatttttcttctctctattagtcatgttaatatagagagaggaaaggaacggtttttttctgtgaaaaaaatcatttcaaatttgtatggggaggtttcaattttggaaaaaaaggtcgtattagtagatggtaataatatcgcgtatcgtgcattctttgcactaccgcttttaaataacgacaaaggtatacatacgaacgcaatttacggttttacaatgatgttaatgagaatattagaggaagaaaagccaactcatatgttagtggcgtttgatgcaggcaaaacaacgttccgtcataaaacgtatagtgagtataaaggagggcgtcaaaagactccacctgaattatcagagcagttcccgtttattcgtgagatgctggatgcgttcaatgtaccgcgttatgaattagaaaattatgaagcggatgacatcatgggaacgttagcgaaagaagcgagtgagcaaggggcaagtgtaaaagttatttcaggagataaagatttacttcaacttgtttctgataacacgcttgtatgtattccgcgaaaagggattacagaagtggatgaatatacgaaagaagctttatttgaaaaatacagcttatcaccaaagcaaattatcgatatgaaaggtttaatgggagaccagtcagataatataccgggtgtaccaggagttggtgaaaaaacggcaattaaattgttaacacagtttggaacggttgaagcggtgtatgaaaatatagatcaagtaagtgggaagaaattaaaagaaaaactggaagaaaataaagaacaagctcttatgagtaaggatcttgcaactattattacagatgcgccgattacagttcgtgtggatgatatggcgtataaaggatatgaagcaagtgatgtcattccaatgttcgagagtttaggatttacatcccttttaaataaattaggcgttacgccagaagaaactgctccagctgaattagatgatattacatttgatattgtggaagaagttacagaagaaatgcttcagcaagatagtgcgcttatcgttgaagtacaagaagataactatcataaagcagacattcaaggtttcggtattcaaaatgaaaatggatgttactttattcagacagacattgctcttaagtcagatgcttttaaagagtggcttgcagatggagaaatgagaaagcatacatttgatgcgaagcgtgcaatcgttgcactgaaatggaatgggatagatatgcaagggattgactttgatctattaatcgctgcttatttacttgatccagctgatacggataaagacttccgtactgtagcgaaaatgaaagaaacgcatgctgtgaaatctgatgaagaagtttacggaaaaggtgcgaagcgtgctgttccaaagttagaggtagtagcggagcatgtggctcgtaaagtgcatgtattatatgatgtaaagcaaacattcgttgaagagttaaagaagaatgagcaatatgaactgtttacagagttagaattgccgcttgcacgtgtattagctgatatggaagtaaagggtgtaaaagttgatacagagcgtcttcgtaatatgggagaagaacttgcgggtagattaaaggaaatggaacaggaaatttataagcttgcgggaacagaatttaatattaattcaccgaagcagcttggtgttattctgtttgagaacttaaacttgccggttattaaaaagacgaaaacaggttattctacgtcagctgatgtactagataagcttatgaatcaccatgaaattattccaaatattttacattatcgtcaattagggaaactaaattcaacttacattgaaggtttgctgaaagttgtacatgaagattcatctaaaattcatactcgctttaatcaagtgttaacgcaaacaggtcgattaagttcaacggatccgaacttgcaaaatatcccaattcgattagaagaaggaagaaagattcgtcaggcatttgttccgtcagaagaaggatggattatgtatgcggctgattactcacaaatcgaactgcgtgtattagctcatattgcaaatgataaagggctagttgaagcattccaacatgatatggatattcatacgaaaacagctatggatgtatttggcgttaaaaaagatgaagtaacttcaaatatgagacgacaagcgaaagctgttaatttcggaattgtatatggtattagtgattatggtctttcacaaaacttaggaattacaagaaaagcagcagcggaatttattgaaaagtatttagaaagtttccctggtgtacaagaatacatggaggacatcgtaaaagatgcgaaacaaaaaggatatgtggctacattattaaatcgtcgccgttatattccagaaattacgagtcgtaatttcaatttacgtagcttcgctgagcgtacagcgatgaatacaccaattcaaggtactgccgcagatattattaaaaaagcgatgattattatggcggatcgtttagaagaagaaggattacaagcacgtcttcttctgcaagtacacgatgaattgatatttgaagcgccaaaagaagaaattgaaaaattagagaagcttgtacctgaagtaatggagcatgcaattgaacttgcagttccgctgaaagttgattattcttacggtccaacttggtacgacgcaaaataaggaagtgatgaaatgcctgaattaccagaggttgaaaacgtcagacggacacttgaaaatcttgtaacaggaaaaacgattgaagatgttattgttacttatccaaaaatagtgaaacgaccggatgatgcagaaatctttaaagaaatgctaaaaggcgagaagattgaaaatataaagcgaagaggaaagtttttgcttttatatgtaacgaattatgttattgtttcacatttgcgtatggaaggtaagtttttactacatcaagaggatgagccgattgataaacatacgcacgtccgtttcttatttacagatggaacggaattacattataaagatgtgagaaagtttggtacgatgcatctctttaagaaaggtgaagaaatgaaccaaatgcctcttgcggacttaggtccggagccatttgatcctgaaatgacaccgcagtatttacaagaaagattacaaaagacaaatcgtaaaataaaagttgtgctactggatcagcgtcttttagtagggcttggaaatatatatgtagatgaagttttattccgttctcaaattcatccggaacgagaagcttcgtctttaacagtagaagaaattgagcgaatttatgaggctaccgttacaacgctaggcgaagcagtaaagcgtggcggaagtacaattcggacgtatatcaactcacaagggcaaattggttcgttccaagaactcctaaatgtatatgggaaaaaaggagagccgtgcgtaacttgtggcacgatattagaaaaaacagttgttggcgggcgaggaacgcattactgcccaatttgtcagcctagaatatagaaaagagataacatcggataggcatttgtcatatacatacagcagagctatgtataagggaggagcttaccgatgtacctttatttatctcttattttattagcttttacattaagcttggatagctgtagtgtagggctaacatatggtttaagaagcgtaagaattccactaagatcaattataattatcggaatgtgttcagcggctgttatgcttgtttcaatgggaattggacatatgatcgcgaaagtattttcacctgttatcgcaacgcgtatcggtgggcttgttcttattggaatagggatttgggtattatatcaattttttcgaagtgagaaaaaagaagaaccgaagcaagaggagaaggtctggaaattagagattgcctcgctagggctagtgattcaaattttacggaaaccgactgtagcagattttgataaatcaggaaccatttctgcaggagaagcattgcttcttggtatcgctctttctgtagactcatttggtgccggaattggtgcatctttattagggtatgtacccgctatgatggcgatattagttgcaattatgagttctttgtttttatttattggaatgaaacttggaacggttttatcgaatatgaagtggttacaaaaatttacattcctgcctggagtattactcattattattggaatttggaaaatgtaagtatgggcgtggaacattagtttcgcgccttttattatgaggaggattatgatgacagtagtaattggattaacaggaggcattgcaagtggaaaaagtacagtgtctcaaatgtttcgtgaactgagcataccagttattgatgcagatattattgcacgagaagttgtagagcgaggaaaaccagcatataacaaaatagtagaagtatttggaacggaagtgttacaagaagatggagaactagatcgtccaaaactaggaagtgtcgttttctataatgaagaaaaacgattggagttaaataaaattgttcatcctgcagtgcgtgaggaaatgaataggcaaaaggaaatgtacataaaagaaggtatgcaagcggttgtgttagatattcctctcttatttgaaagcaaattaacaagtctcgttgaccgaattttagttgtagcggttaagccgcatacgcaattagaacgtttaatgaaacgaaataacttttcagaagaagaagcaacagctcgtattcaatctcaaatgccgttagaagaaaaagtgaaaaatgcagatgaagtgataaataatgatggcacaattatgggaacgaaaacacaattgcaggtaattttaaagaagtggaacattattgactaaaaaattgtgaaattaatgaaaatgcttagtgacatatcccctttttgtgttatactattattgggattggagataaatagtataacgcattcaagggggataacatattatgactcgtgtggcaattaatggatttggacgtattgggagaatggtatttcgtcaagcaataaaagaaagcgcattcgaaattgtagcaatcaatgcaagctatccatctgaaacgttagcacacttaattaaatatgatacagttcatggcaagtttgacggaacagtagaagcatttgaagatcacttattagttgatgggaaaatgattcgccttttaaacaaccgcgatccaaaggaattgccttggacagatttaggtgttgaagttgtaattgaagcaactggtaaatttaattcaaaagaaaaagcaattcttcacgttgaagctggagcgaaaaaagtaattttaacagcgcctggtaaaaatgaagatgtaacaattgtagttggtgtgaacgaagaccaattagatattacaaaacatactgttatttcaaatgcatcttgtacaacaaactgtttagcgcctgttgtgaaggtgttagatgagcagtttggaattgaaaacggtttaatgacgacagttcacgcctatacaaatgaccaaaaaaatattgataacccacataaagatttaagaagagcacgtgcttgcggacaatcaatcattccgacaacgacaggtgctgcgaaagcgctagcaaaagttcttccacatttaaacggaaaacttcatggtatggcacttcgtgtaccaacaccaaacgtgtctcttgttgatttagtagtagatgtaaaacgcgatgtgacagttgaagccattaacgatgcattcaaaactgttgcaaacggtgcgttaaaaggtattgtagaattcagcgaagagcctttagtatctatcgactttaatacaaatacacactcagctattattgatggtttatctacaatggtaatgggtgatcgtaaagtgaaagtacttgcttggtatgataacgagtggggctactctcgtcgtgttgtagatcttgtaacgttagttgttgaagagttagcgaaacaagaaaatgtgcaacacatttaagtgaataagggaggagagggcaaggcaacatttgccctctttttttaattttttctgaaaaggaaaaaaattatataagtatatttaaaaaagtggacataccacgaagcgttgtgattactgcatttgtgaatcgtttattttttttagggaaaagtaaagaggaaaatatgacagaaaatcgaaaaaactgttgttgcaaaatgaaaataaacaaagtatactaacactcgtaaacttaagagctgaggtacgtagtcactacttaaagggttaggacctctctggactaactttcccccgtggtagtggagcaagccaaattgcaaattagttttcaattcgaacagttagaataaatttacaagggggaactgtagaatggatactatggatacgatgggtcgtcacgtgattgctgaactttgggattgcgatttcgacaaactgaatgacatgccgtatattgaacaattatttgtggatgcagcactaaaagctggtgctgaagtgcgtgaggttgctttccataaatttgcaccacaaggtgtaagtggagtagtaattatctcggaatcacatttaacaattcatagctttccggagcacggttacgcaagtattgatgtttatacttgtggggatcgtattgatccaaatgttgctgcagaatatattgcagaaggtttaaacgcgaaaacgcgtgagagcatcgagcttcctcgaggaactggtagcttcgaaattaagcagagagaaacaaaagctctttaaaaaagaacataattgatttaaaatgtaaagaggtgtataatgcacctcttttttagtttataaaaaaggaaaaatataacgtactcgttagttgaataaattggattcttgcaaatgaggtagtgctctatataccatcttatttttaaggatgagatgataaagtgatgcgctgaaacttaaagtggtaagagagttagaatgagttatataatattgtatatatattttaggtgaagtgagtagagaaaaataaagagtatagtgtaaaggagtgaatgtattgcgttgtccatcctgttctcataatggtacaagagtgttagattcgcgtccggtagacgaggggcgctctattcgaagaaggagagagtgtgaaagctgcttaagtcgctttacgacctttgaaagggtagaagagtcacctcttatcgttgtaaaaaaagaaggcacacgagaagagtttaataaagaaaagattttacgtggtttaattaaagcgtgtgaaaaaagaccagtatctttaagacaattagaagaagtaacacaaagcgtggaacgtgaactgcgtaatttaggtatatcagaagtgaaaagtgatatgattggtgaaattgtcatggaagaacttcgcgatattgatgatgttgcttacgtacgttttgcttctgtatatcgtcaatttaaagatttaaatgtatttattgaagaattaaaagatatactgcaaaaagaaagagagtagaagttgtattttattctctttacataccgtaaataataggataagagagctagaagcgcaagctaatagctctttttcactaagaatttatataatgaagatagaacgaatgaagtagaggatagattggatgagagaaaggaaaagcaagaatggaaaaacagtcatggatggagctattgccgattgatcgttataaagtaagtgcgaaagggctactgcacaattacgaccgaaaagtgttaacgatgttgtatcagccgttaataggtagtagagcttttagcttatacatgacactatggggagagctagagcaagatcgtgtatttggaaaagagaatacgcatcattcccttatggtgactatgcaaatgcaacttcctgaaatatatgaggaacgagtaaagttagaggcaattgggctattgaaggtatatattaagaaagaaaaagatattcgaatgttcatatatgagttgcaaccacctttatctccgaagcagttttttgatgatattgttttaagtatctttttatacaatcgattgagccggacaaaatataatcaagtaaagcaatatttcttagaagaagaatttgattttgcttcttatgaaaatgttacgcgttctttcaatgatgtgtttggttcgtttaatccaggacagcttgagcatgcgcaagaagaccttcgtattccaaaaacgacaactatgccaagtaacgagaagggagacgctccgaaagtttggaatgatttctttgatttctctttatttgtagatggattgtccgctcttgttcctaaaaaggcgattacagatcaagtgagagactgcgttataacacttgcttacgtgtatggtgtagatgtgttatcgatgcaaaatatcgttcttggtgcagtgacagagatgcaaacaattgatacggaaaggcttagaaaaggagcgcgcgattggtatcaatttgaaaatggtcaagcattaccggtattaagtgaaagagtacagcctcatgctgcacgtacgatgaaagagaaagagccttcatcgcaagaggagatgttaataaagcagctagaggaaatctcgccaaaacaactattgaaagagatttctggtggtgcagaggcaacgaaagcggacttgcagatcgttgaagatgtcatgattaatcaaaaattgacaccaggagttgtgaatgtacttatttattacgttatgctacgctcagatatgaaacttgcgaaaacgtatgtcgagaagattgctgggcattgggcacgtaaaaaggtcggtacagtagcggacgcgatggcgttagcgaaagaagagaaccgtcaatatcaagagtgggctgagacgaagaaaaaaggccgtacggcgaagaaaacggtgcggaaagaaatggtgccagattggcttaaggaagaagagccgaaagaacaagagaaagaaacagagaagaaagatacaagtgtagaaaaagatgcaagtacgctagaagatgaaagaaaacgactagaagaagtgttaaaaaaatataagcgtgattaatagaagagaatgaacgctctttgaggtgagaaaatggagcatattcaaaattcatttgcaaaattaatggaaaatgaaaactttaaaaatagatatgaagtactaaaggcagaagtaatggcgcatccgcgggtgaaagaatttatagacgaacataagggtgaagtaacgacttctatgattgagcgcagtcttgtgaagttatatgaatatattggacaaagtgtaggttgcgtggattgtccggatttaggttcatgtaaaaatatgctacaaggttatgagccaaagcttgttattcaagggaagatgattgatattcaatacgatcgctgcgttagaaaagtagcgcatgacgagagaaagaaatatgaaaaactcgttcaaagtgtatatatgccaacggatattttgcaggcaactatggaaaacttagacccttctgatttaaatgcacgtatcgatgcaattggtgcagcgaatgaatttttaagtacatatgaaccaggtaaaaaagcacaaggtttatatttgtacggtaaatttggtgtaggaaaaacgtaccttttaggagcaatagcgaacgagcttgctcgaaagaaaataagttcgatgctcgtatacttcccggaatttttacgtgaaattaaaagttcaattcaagataattcgattggtgaaaagattgatgcggttaaacgcgtacaagttttaatgttagacgatatcggggcagaagcgatgtcaagctttgtgcgtgacgatgtgcttggtgcaatcttgcaattccgtatgttagaaaacttaccgacgttctttacgtctaattttgattttaaacaactggaacaccatttaacgtatacgcagcgtggtgaggctgaagaaatgaaagcagcacgtattatggaaagaattaaatatttagcgaaaccagttccaattggtgggaaaaaccgtcgtcataagtaaaagagtaagcttctcagcttgctctttttttgtattatagtgatattttcttttcgaatatgagatcgaaatattcaggttgtccagaactgccaaacgtaggggcaacaatctgtacgaacctccagccatctctagcatgttcttgaataatttcttggtagtcttcagctggttttgagcgagtgaacccccaatgtaattcgacttttacgaatttatattcaaacattcagatacccccttttattgataagtaaagtatacaataaaaattcatagtagcttgtatcatttttttctccctcccttaatatatataaaattagcaagccatattgagtggattttctaacgataggaaatgtgattctactaagagtgaaattcacgcgggacggactcttataggatttgtaacgtatagatacagtcctttagagcggggataaaaggggggacaaaagtgattgaaatttgcttcgaagaaaaaaatgatgctatgcacgtatatagacaattgctgaaaagagcggaagtgttatataaggaaacgagtgtgtatttacaggaacaaaaagtggtgattcacataccagtacgtgaatcgaattatattgaaaaaatcttattgccagtaatggtgtatttcattgtgaatgtgaaacaaaatgagtggatttatacgattttaaaagaaaagtttttttatgaagaacaagaagagtgtcatcaaatattgcacatggcacatgagattttaaagggaagaagaaaaggtgtagctcaggatttaacgcgtaacgcatttgagtcatatattaagtcttctttaaataattggctttgtgatccgctctcattctcgttttcatcatatatccgttttcgtcttcgtacatatagggaaatggtgactaaacttgcggaagtggcaattgatgaatataagatggagcaagaataccaaatgttcattgagacgcttcggcaacaagtaagtagccgtaaatcacgtttgtcttgcgtgcatcttatttttgatgaaagctttatcttttatgatgataaaggtagacgtttaaaacaggagaagttggtccaatatatagatgaggaattattaaagcaaaatgatgtatatattgatacgaaagtaattgcgccgcttctttctatttcgcctaaaaagatttatttatatacgaaagaacaagaccataatatgattattactttgcgaaatgtgttccaagaacgggtccaattacatggattacatgattttgagcgcaatgtgaaaaatttaaaaaataaaggtaacgcccttgattttctaagtttttgagcatataattacctacataaatgaaatatattgaaatgtcatgatgaggacatgagtagttttctacgattttcagagagggaagccttagggtgtgagcttcctagtacgggattattacttaccacctctaaactttagcagtgaacggtttttctagtaattgctaacggacaacaccgttatgttgaacttgagcaattaacaattatgttaattggaacaagggtggaaccacgaattcaacactcgtccctttttacgggatgagtgttttttattttgagaaaaagaggagtgaccagtgatggcagatgtagttaaaattactttccctgatggagctgtgaaggagtttccaaaaggcgtaacaactgaagaaatcgcagcttctattagcccaggcttaaagaaaaaagctgtagctggaaaattaaacgatgagatgatcgatcttgttacaccaatcgaagaagatggtgcagtttctatcattacattagattctgaagatggcctatatattttacgccattcaacagcccaccttttagcacaagcgttaaaacgtttatataaagatgttaaggttgagcttggcattggtccagtaattgaaaatggcttctactacgatattgatatggaagaagcaattacagttgaagacttcaagaaaatcgaaaaagaaatgcaaaaaatcgtgaacgagaacttagaaatcgttcgtcatgaagtaccacgtgcagaagcaattcgtcgctttgaagaaatcggcgatgagttaaaattagatttaattaacgatcttccagaagatgcagttatttcaatctatgagcaaggcgaatttttcgacctttgtcgtggtgttcaccttccatctacagggaaaattaaagtgtttaaattattaagcgttgcaggtgcttactggcgcggcgatagcaataataaaatgctacaacgtatttacggtactgcattcgttaagaaagcagaattagatgagcacttacgtatgcttgaagaagcgaaagagcgcgatcaccgtaaattaggtaaagaattaaaactatttactaatagccaaaaagtaggacaaggtttaccactttggttaccaaaaggtgcaacaatccgccgcattatcgagcgttacatcgttgataaagaagcaagcttaggctatgatcacgtatatactccagtactagggagcagagagctttatgaaacttctggtcactggaaccactaccgtgatggcatgttcccatcaatggaaatggataacgaagaattagttcttcgtccaatgaactgtcctcatcatatgatggtttataaaaatgatattcacagctaccgtgaattaccaatccgtattgcagaacttggaacaatgcaccgttatgaaatgtcaggtgcgttatctggattacaacgtgtacgcggaatgactttaaacgatgcgcacattttcgttcgtccagatcaaattaaagaagagttaaaacgtgttgtaaacttaactctagaagtgtacaaagatttcggtttagagaactactcattccgtctatcttaccgcgacccagcagatactaaaaagtattatgcggatgatgagatgtgggaaaaagcacaaggtatgttaaaagaagctatggatgaaatgggtcttgattactatgaagctgaaggtgaagcggcattctacggtccaaaacttgatgttcaagttcgtactgctcttggaaaagacgaaacactttcaactgtacaattagacttcttacttccagaacgctttgaattatcatacgttggtgaagacggtaaacaacatcgtccagttgtaattcaccgtggtgttgtatcaactatggaacgttttgtagccttcttaattgaagaatacaaaggtgcattcccaacatggttagctccagttcaagtacaagtaattccagtttctccgcaagtacatttagactatgcgaagaaagtacaagacgaattgcgtcgtgctggtatccgtgttgaattagacactcgtgaagagaagatcggttacaaaatccgtgaagcacaaatgcaaaaaattccgtacatgcttgtagtaggtgacaatgaagtaactgaaaacggcgtaaacgtacgtaaatatggtgaacaaaaatcagaaacaatcgcattagatgcttttgttgacatgattaaagtagaaggaaaacgataagaaaaagccgcggtataccgcggcttttttatgtaatatactcgagagaaattagaaaaaataaccatgtgacacttatcataaaaaagtattgcaagtatgttagttgtttgttacaatatttcttgttgttagtaaaacacatcgcgtcttcttgacagacgtcatgtcctatgataaactcatcaaggataatagaatattgttttgtggaacaagtagaagcacccgcttctcacctgatggacgcattcgcagttaacaggtaaatgtatttcttacttaagattttacaagtgtgggtgtcgtatgcccgcactttttttgttcgggttctatgactacaaaatatgttctgagaaaaccttggaggtggcttactattagcaaggatatgatgattaacgagcaaattcgtgcacgtgaagtacgtttagttggcgcaaatggcgatcaacttggaatcaagtctcgtaatgacgctttagacttagctgcaaatcttaatcttgatttagtattagttgctccaaatgcgaaaccgccagtatgccgcattatggactacggtaaattccgctttgagcaacagaagaaagaaaaagagcagcgcaaaaatcaaaaagtaattagcatgaaagaagttcgtttaagtccaacaattgatgaacacgactttaacacaaaacttcgtaatgctatcaagtttttagagaaaggcgacaaggttaaagcgtcaattcgctttaaaggacgtgccattactcataaagaaatcggtcaacgtgttttagatcgcttctcagaagcttgtgctgaagttagtacagttgaatctaagcctaaaatggaaggacgcagtatgttcttagttttagcaccgaaaaacgataagtaatagatagaggaggaaatacctatgcctaaacaaaaaactcatcgcggcgctgcaaagcgtttcaaaaagactggatcaggtaaactgaaacgttctcacgcttacacaagccatttattcgctaacaaatctacaaaagctaaacgtaaactacgtaaagctggtgtagtaagcgctggtgacttcaaacgcattcgtcaaatgcttgacaacttaaaataagttcggctgatatatagaacaattaggaggtaatattatgccaagagtaaaaggtggtacagttactcgtcaacgtcgtaaaaaagtaattaaattagcaaaaggttactacggttcaaaaaatacattattcaaggttgctaaccaacaggttatgaaatctctaatgtatgcattccgtgaccgccgtcaaaagaaacgtgacttccgtaaattatggattacacgtatcaacgcagcagctcgtatgaatggtctttcttacagccgcttaatgcacggtcttaaaaatgctggcatcgaagttaaccgcaagatgcttgctgacttagctgttcatgacgaaaaagctttcgctgaattagcaacagttgcaaaaaacaacattaactaattaattagttaaaaccttagaagaattttcttctaaggttttttatttgtattcaaagagaagttagaagtgaaaagaaattctaaagattaacgactatgtcattatcaatatgacaaaatcaatataaaagttatagcagtatagaagaatatatatatgaagtcaggagaatactcctggctttttttaattctgctcttttggaaagaagagtatctttcctagccgaaacgacactgctataatggaaagatgatatggaactttcatcagatgaacaatttaagagcgatgactgaaacgtatttgtaaattaaggacaagctattttataaagaggtagatagctgacttattcataagaactgaaacataataatgaactttgagatgaaacaacattgttgcgaaaaatgcgatgttggaggaggacaatagaatggacttactacaactatttaaattacaaaaagaattagatgaccgtattgcaaaagaacatgacttacaaccgaaaaaattgttaaaagaaaaaatgttagctcttcttgtagaaattggagaacttgcaaatgaaacacgttgttttaaatattggagcaacaaaccagcttcggaacgtgaagtaatattagaagagtacgtagatggtttgcattttattttatcaatcggaattgatttaggtattgataaaaacttcctattctataaatgtgcacaaacgaataaaacacaagtggaaattttcttagacacatatgcgaaagtaattcgttttacagatcaaccatctattacaaactatattgaattatttacgagctatcttcgacttggacaagcacttgaatttgagcaagaagagattgaaaaagcatatttagataaaaatgaagtaaatcatcagcgtcaaacacaaggatactaatttaatttttgaatatttcaatttaattattgtataataaattgactgaagaaaaaggagggtgttggcaatgacaaaattagacgcgacattgacaatgctaaaagaattaacagatgcacgtggtattgccggtaacgagcgtgaaccacgtgaagtaatgaagaaatatatcgagccgtttgcggacgaactttctactgataatttagggagtttagttgcgaaaaaagtaggggaagaaaacggtccgaaaattatggttgcaggtcatttagatgaagttggatttatgattacacaaatcgatgacaaaggtttccttcgcttccaaacggttggtggctggtggtcacaagttatgcttgcgcagcgcgtgacgattgtaacgcgtaaaggagatgtaacaggtgtaattggttcaaaaccaccgcacattttacctccagaagctcgtaaaaagccagttgaaattaaagacatgttcatcgatatcggtgcttctagccaagaagaagcaatggagtggggcgtacgaccaggagatcaagttgtaccttactttgaattccaagtgatgaagaatgaaaaaatgttacttgcaaaagcatgggataaccgaatcggttgtgcaattgcaattgacgtattaaaacaattaaaagatgaaaagcatccaaacgttgtatacggcgttggaactgtacaagaagaagttggtcttcgtggcgcaaaaacatctgcgaattatattaaaccagatatcgcgttcgcagtagatgttggtatcgctggagatacaccgggtgtaacgtcaaaagaagcgcaaagtaaaatgggcgatggaccacaaatcattttatatgatgcttctgttattggacatacaggtttacgtgatttcgtagttgatgttgctgatgaattacaaatcccgtatcaatatgattcagtagcgggcggaggaacggatgcgggtgcgattcacattgctgtaaatggtattccttctatggcaattacaattgcaacgcgctatatccattctcatgcggcaatgttacaccgtgatgattatgaaaatgcagtaaagttaattgtagaagttattaaacgtcttgataaagaggctgtacataacattacatttaattaatagaaaaagcgaaggacattctccttcgcttttttatgttttaaaaaggccgttctaatcccgctgcagtatgagcacctaaaataattaaacgagttaattgcatcgccataaaatgcggggtatatatcatccctctttttagccatgacataatcatccctagatgggcaccagtaacataactaatgagaatatcgcgtggaaccattagtttttcatcgttaggttgtgaaatagagaggcttaatgttaaatgcgtttgaattgctttcatcatcttatacgtatagtttccggccgctttatcaccaagcatgacgttatagaagttagtgttttctgcaatatgttcgaacaaggccaaaaaacttggatgtggcgaatcaaatgttagttggaaatcttctttatttctatttcttggtttaattacttcagttagcttttctaacatttcttcaatgcttttgtctagtaagtcatatttatcgtggtaatggctataaaatgtagcgcggtttacaggagcgcgttctgcaatatgttgaacagttacattttcaaaacctttttcgcctactaaagcgacaaaagcatcctgtatgagttgtctcgtccgttttacacgtggatcatttgtatttttaatagacatttttatttcccctcgtttaattttctatacttaaacaacatattggtattatattgttgtttaaccgacatttcatacataaattgtcggttgtagattcaaaataattatttataattataaacgatagtccttcagaaatcagcaccgctcgcaggtagataaatttcgatttacgctgcaaatggtgtgatttttttgttaaaaggttaatataattaacaattaaacaatctaaacaataaggacataaatagtttagaaaaaaattatatgcgatataaggagaggaatgcaatgaatcagtttcgaagaatggtaattatcaacattatcacattaattgtactagttggcggcggtattggcggttattactattacaatcaaacggaaaattacttaaaaacagacaatgcaaagattgatggaaaggtaattccggttgcttcaccagtagcaggtaaactaactgaatggaaagctgaagtaggaaaaaattataatgagaacgataaattaggtactgttactgtagcggcagctaatggagaacaaacagtagatgtaacaattccacaaaatgcaacagttgtacaatcaaacgcgacaacaaatgctttcgttggagcaggtagcccgattgcttatgcatttgatatgaacaatttatgggtaacagcaaacattgaagaaacagatgttgatgatgttcaaaaaggtcaaaatgtagatgtgtatgtagatgcatacccagatacaacgttaacaggaaaagtagaacaagttggcttaacaacagcgaatacattctctatgttgccatcaagcaacgcaacagcgaactatacgaaagtaacacaagtagtaccagttaaaatttctttagatcatagcaaatcagtaaatattgttcctggcatgaatgtgacagttcgtattcataagtaagggggagatgagatgtcctcaattgtaattgcaggatatgcactattttgtataatcgtcttcttccttgtaaatcgtcttttacgaaagaaaaaaacgaaaatgggagaagaacaagtcccagccgtaagtaaaatagaaataagtaaagttgaaacagaagagaaagaaattgaacgaaagcaagaatcggaaatttctaatgtagttgagttagaaacaggaaagcaagaagaagtaaaacaagaaaaagaagtgccgaaaaaacaaatgtctacgcctgtagagaatgtgaacgtaaaagcagttgtagctgtattaattctcggcatgttcgtttctattttaaaccaaacaatcattaacgttgcattacctccgttaatgaatgaatttaacgtatcaacttcaacagcacaatggttaattacaggcttcatgcttgtaaatggtattttagtaccgattagtgcatttttagtttcacgatttacgtatcgtaaattattcgtagcagcaatgttattcttcacggtaggatctatcatttgtgctacttccggaaactttacgatgatgatgacgggccgcgtaattcaagcagttggtgcgggtattttaatgccggttggtatgaatatctttatgacattgttcccgcctcataagcgcggagcagcgatggggttactaggtgtagcgatgattttagctccagctatcggaccgactgtaacaggttgggtaattgaaaattacagctggaacttaatgttctatgcgatgtttattatcggtttaattattacgttcctatctttaaaattctttacactagctcagccagtgtctaaaacaaaattagatgtatttggtgttgttagttcaagtattgggctaggaagcttgctgtacggatttagtgaggctggaaataatagttggactagtgcagaagttgttatttcacttatcattggtgtaattggtttagcgttatttatttggagagagttaacaacggacaataaaatgcttgatttacaagtatttaaatatccagtatttactttcactttagtaattaacgcaatcgttacgatggcattattcggaggtatgttattgcttccagtatatctgcaaaacattcgtggctttacgccaattgaatctggtttactacttcttccaggatcattaattatggggatcatgggaccagtagcgggtaaattattcgataaatatggcattcgtccattagcgataattggattggcaattacgacgtatgcgacatatgaatttacaaaattatcgatggatacaccgtatagcgttattatgacggattatattatacgttcaattggtatgtcattcattatgatgccaattatgacggctggtatgaacgcgctgccgatgaaattaatttctcacggtacagcaacgcaaaatacgtcaagacaagtagcgggttcaatcggaacagcgattttaattacacttatgacgcaacaaacgactgctcacgtagcagattacggcaacatgttaacaacatcaaacccaattttagttgataaaatacatggcatggggcaaagtttagcggccttagctggatcagctcaagcaggagacgcgatgagcacacaactattatatggacaaatttcaaagctatctgcaattaacggtattaacgatgccttcttaatcgcaacgatactagcaggtatcgcttgggtgttatcgttcttcttaccatcaggcaataaaccaaatagaaaagcagggaattaatttccctgctttttttgtctttttaaagagtaagatataaaaggtaataaccacttacagagcataatcctgttataaataaaatcgtccccatagaacgaatactcgatatgtgtcttccgtttactatagctaatagtccagctaaagagaagagaccccaatataaagttcctgaaattggaatcatcccctctaagtctattccataacctatacaaatgataggaacaacgataagagatatgctaattaaaccagctataatagtaaatgatttacgacatttcataccagcaataattaaaaaaatgccgacgatgaattcgcataacattaaagtaaaagctaaaatcatccaaattaatattccgaacatttctgtattacctccgatttgtgggtttcgaaaaaagttatatagaatcaatcacctacagacatgagtacccagaagataacccctaatattccaatggtaaaaataatgaaccccatattacgtatacttttaatttttgcttggaatccacttatccctgctaataatccagttaaagaaaatagggtccagtaaagagcagttggaatggggaatattgtatccatattaattcctatacttaaaaaaacaaaaggtagtgtgacaaaggataggctaagtagccccattaaaccaacgagtaatttccgatatttaattcctgttactattaaaaaaataccaccagcaatcccgcatagtaagagaagtggcgtgaaaagcatccaaataacactaaacatatgtaaactcctttatatgaattaagttatattttactacatgaagtttattttggataatattaataaatatgtataaattgatggaaatgagaagtgattatacgaattaataaaagaggtatcgtgaggatacctctttctaattcaagaatgccaacatattattcataatatgaaataacatagctggaataatggattttgtttttttacataaaatagccattaataatcccatgaagaaagtaatgaccattacgccaagtgagtatgtatgagcgataccgaagaagaagcttgttataatcgctgcaatccaaaatggaaagcgttctgagaaaaagcgaagtataaagccacggaaaataagctcttcaaaaattggtgtgagtattgcaaagccgagaagtaataatatttgatactgcttaaagacatctaagtttagtgcggaagattgctgctttgtagcgtcttggaacacataatttaacaagatgtaattgagtaaaatgtttatagcgaagaaaagaagtaagtatacgtatgtacgccattctttcagtgctttaaagttaaatgattgtagtagtaatttttttgcgggttcgaatttaaaaatgaagaataacaacacggctagctgtaatacaatacttgcagtatttacgatagattcatacagggcaatttgttttttatctgtaagactggctgtataaattgttaagggcattgcgaggaacacagtaataagtccggttccgaaaaaagcgaatacaacggagctaataaattgtccccatgacatagagtatttctgttcattagaaagttgtgtagcgggttgcatatgtagaatcacctctttatatttgtatatttaattataaggcattttgttttcaggcgtaatatttaaatattacatataaaggtgtattttccataaaataataaaagaggtatcaccctgtagtgatgcctctttctcattgataactatgttctgtcttgttattcaattttgcttgctctatttgcaattcacgctctaccaatcgatctaattgctgaattgctttaagtgctttttcataagaaattgttcgataatgatgcgctccgcccggttcttcatctgcttcgtctgcccatttaataatattttgaagagatgttctttcaatttcttgttccactaagaaagaatctgtatgaagaagaattgcaatagaaatttcttttgctagttttggatgttctcctaatctaataagtaatttatgtgctctttcagcgcctttaattgcgtgtatatcattctttttatataagtcataatcccattcaccgcctgtgtaccacgtatgatgtccgatatcatgaaggaagccagcttttgtggcagcatcgactgaggcgtgatgctttttggctaggtgaaacgcatggtaagcgacagcgatcgcgtggaccattccagaacggtttacgtatttttgtgtaatgtggtgtttaaaaatttgttcaagcgtaatacggtgcataaaacattcactccttttatcttatggtgtatatgaagaaaaatcgatcggtttaaatgtattttgaacattgtactccatcatagttcgttagtaaagtagaaatgtttaggagaagaaaaaatttttctgcaaaaaaatcaccttagcttatgcaaaggtgattttcaaattgcttatttttttaatccttgctctagtgtttctaacatttcgtgcttttcattttcatcagcgtttttccaaatgacttcaaataaaacgccaagacctggaagcattttttcttcaccgctttgaattgcatcgacgattgtttcttgtaattgatcttgtgaatttccagatacattcgctaatacagcaccgcgtaaattaaaactcattgctttcacctcttcttcagaattgaaactgacgttagtttttgttcttttttatgtaaatatgtatgaaaaataggctataatgataagacaagaagagagggaaatacatattatgaaaaacattgattcagtacaaaatccgcgtgtaaagcagtggaaaaagctgcaaacgaaaaaagaacgcgataaaaaaggtttattttttgtagaaggattccacttagtcgaggaagctttgaaggcaggaattgtaacagaacttatcgtttcagatcagacagaccttccgaaagattggacagttaatgatgtggaaatgtatatcgtacctgaggcgattgtcaaaatacttcgtgaaacagaaacgacacaaggtgtatttgctgtttgtgagaagcatgagaaagaagtagctcttactgatgggaaattccttttattagatggcctgcaagacccaggtaatttaggaacaattattcgtacagctgatgcagctggtattcacgccgttgtgcttggagaaggttgtgttgatgtttacaatagtaaagtactccgctctacacaaggctctattttccacttaccaattgtaaaagggaacttagaagaatgggtagacaagttaaaagaaaacaacgttcctgtatatggaacagctcttgaaaatggagttccgtatggtgaagtaacgccggctggcagttttgcattaattgtaggaaatgaaggaaatggcgtacgccaagaaattcttgcaaaaacggatcaaaacttgtatattccgatttacggcggggcagaatcattaaatgttgcggttgcagcagggattttaacgtattatttgcaaagcccggttgcgaacaaataaaaaacttcttataataagttgaagtacattatattaaaagttaaataacgaaaaacgttgatagagaagagtaacttacaaaatcgccatatagggagagagtgccgtagactgaaagcattcttatggtagacggaagtgaattcacctctggagttgacgccaggaccatgtatatgtaaaggcgttccggtcagaattgatcgttataactaatgagtgggcagacttgttctgtcaatttagggtggtaccgcgaatttacctcgtccctttttgggagcgaggtttttttatttttaaaattaggagggttccaaaatggaagcacgtttaaaagagctaaagcaaaaagcgttagagcttattgaagaagcgaaagagctaaagggcttaaacgacgtacgcgtagcgtatttaggaaaaaaaggcccaattacagaagtattacgcggcatgggaaaattgtcagcagaagagcgtccacgtatgggagcattagtaaatgaagtgcgtgaagcgattcaaacgcgtttagatgacaaaattagtaacttagaaaaagcagtaatcgaagcgaaattagctactgaaacaatcgatgttacactgccaggtcgtcctgttgaaacaggttgtcaccatccgttaacagctgttgttgagcaaattgaagatgtattcatcggtatgggttatgaagtagctgaaggaacagaagtagaaaaagactactacaacttcgaagcactaaacttaccgaaagatcacccagcgcgtgatatgcaagatacattctacattacagaagaaacgttactacgtacacatacatcttctgtgcaagcacgtacgatggaaaataataaagaaaaaggcccaatcaaaattatttgtcctggtaaagtgtatcgccgtgatgacgacgatgcgacgcattcgcatcagttcatgcaaattgaaggtcttgtaattgataaaaacattcgtatgagtgacttaaaaggtacactgcaagtattcgtgaaaaagatgttcggtgaagatcgtgaaatccgtcttcgtccaagtttcttcccattcacagagccatctgtagagatggatatttcttgtatgatgtgtcatggcaaaggttgcggcacttgtaaaggaactggctggattgaaattctaggcgcaggtatggttcacccgaacgtacttgaaatggctggttatgattcaaaagaatatcaaggtttcgcattcggtatgggcgcagagcgtatcgcaatgttgaaatacggagtagatgacattcgtcatttctatacaaatgatgtacgtttcttacaacaattcaaacgagcgtaagggaaggagaggataaatatgttcgtatcatatcgttggttacaagagtatgtagatattaaagatgtaacagcacaagaactagcagacaaaatcacgaaaagtggtattgaagtagaaggcgttgaagtattaaataaaggtgtaaaaggtgttgtagttggtcacgtattagaatgtgaaaaacacccagaagctgataaattaagcaaatgcttaatcgatatcggtgaagaagagccagttcaaattatttgtggagctgctaacattgcaaaaggtttaaaagtaccagttgcaaaagttggtgctgtacttcctggtaacttcaaaattaaaaaagcaaaactacgtggtgaagcttctcacggtatggtttgtgctcttcaagagcttggcattgatggaaagttagtttcaaaagaatatgcagatggtatcttcatcttcccaagtgacgctgaagttggtgcagatgcacttgaaattttaaacttacacgatgaagtacttgagcttggtttaacaccaaaccgtgcagattgcctaaacatgttaggtgttgcatatgaagtagctgctatttatggccgcgaagtaaaacttccagctatcgacttacaagaaacagcagaaaaaacttctgattatatttctgtaagtgtagaagcgaaagaagaaaacccgttatacattgcaaaaatggttaaaaacgtaaagattggtccatcaccaatgtggatgcaaactcgtcttatggcagctggcattcgtccaattagcaacgtagttgatattacaaactacattttaatggaatacggtcaaccgttacatgcattcgattacgataaattaggttcaaaagaaatcgttgttcgtcttgcaaaagaaggcgaaaaaattgaaacgttagatgatcaagagcgtacattacaaagccaccatcttgtaattacaaacggcacgaaagctttagctgttgctggtgtaatgggcggggcggattctgaagttacaaatgagacagtaaacgttctaattgagtctgcatactttgcaggtcaaacagtacgtcgtacatcaaaagacttaggtcttcgtagtgaatcaagtgcacgtttcgaaaaaggaatcgatccaacacgtacatttgaagcaattcaacacgcagctgctttaatggcgaaatatgctggcggtgaagcacttgaaggtgtagtagaagctgacaacttacaagtacaagagcgtacagtatctgttactgctgaaaaagtaaaccgtgtattaggtacaaatatttctgcgagtgaaatgggtacaatgttcacaaacttgaaattcccatttacagaagtagaaggaacattccatgtaaatgtaccagcacgtcgtcctgatattacaatttcagaagacttagtagaagaagtgggccgtctatacggttatgaccacattccagttacattaccttctggaacgatgactcgtggtaaattaacatcagcacaaacgaaacgtcgtaaagtacgccgcttcttagagggtgctggtttatatgaagcaattacgtattcattaacaagcgctgacaaagcgaaacaatatatggttgagccaaacgaaaaggcgcctgtaggtcttgcacttccaatgagtgaagaacgtagccaacttcgtttaagcttagtaccgcaattactagaagcagtttcatacaatgtcgctcgtaaaaacgacagcgttgctttatacgaagtaggttctatcttcttaccgacagaagaaggagaacttccgaaagaagaacaacatcttgcaggtgttatgacaggtcttgctcttcaccatgcatggcaaggtgagaagaaagtagtagacttcttcgttgtgaaaggtgtactagaaggactattcgacgtgcttggcgtttcaaatcaaatcacatatgcaccagcaaaacgtgaaggtatgcacccaggccgtacagctgacatcgtattagatggcgaagtaattggtttcatcggtcaattgcacccagaagcagaaaaacaattagatgtgaaaaatacattcgtatttgaattatctcttgtaaaagtattcggtgcagacgctgaggaaacttactactcagcaattccacgtttcccatctatgacacgtgacatggctgttgtagtaacaaaagaaacaaaagctggtgaaatgaagcaagtcattgctgaagctggcggagaacttctgaaagacgtaacactattcgacttatacgaaggtgaaaaaatggaagaaggcaagaaatcacttgcattctctatgacttacttcgatgcagaacgtacattaacagacgaagaagtaacagaagcacataaccgtgtactaacaacggtagaagagaaattcggtgcggagttacgtaagtaattagaaaattgccggattcattccggcaatttttttattggattggttgtcggacactgtcggtaagtcgatatattacaaaaatcgctcatatattttccgacaccttgcatctttctctcgaatgtagtacattaattttagtttaacaaaatgaaagacgatgataaggaaaagtagtatatactataatccaaagcgagtcagggacggtgagagcctgatgaggcggtatatgtgaagaacaccttggagttgctaaccgaaattgaattttgtattcaagagtagacttagacgggaatccggcctgttacaaaccgggaagtatgtattacatacgagttaaagttggtctttatgacaaattgggtggtaccgcgaagtttaacctttcgtccctttatggatgaaaggtttttttgtatttaaatatatgagcaaaggagaatttcactatggaaaacacattagtaaaaagtctgtatagagatacagaaaagtatgcagatcaaacagtacaagtatcagggtggattcgtaacttacgtgattcaaaagcatttggtttcatcgaattaaacgacggtagcttctttaaaagcgttcaaatcgttttcgatacagaattagagaacttcaaagaaattgcaaaacttccacttagctcttcagttaaagtagaaggtaaagtaattgcaacgccgggagcgaagcaaccatttgaaattaaagcagaaaaaattgatatcgagggtttatcagattctgattacccacttcaaaagaaacgtcatacgtttgaatacttacgtacaatcgctcacttacgtccaagaacaaatgcattctctgcaacgttccgcgtacgttctatcgcagcatttgcgattcaccaattcttccaagagcgtggattcgtacatgttcacacaccaatcatcactggtagtgatacagaaggtgctggcgaaatgttccgcgtaacaacgcaagatttaaataacctaccaaaaggtgaagacggaaaagttgatgagtcaaaagacttcttcggtaaagaaacaaacttaacagtaagtggacagctgaacgctgaagcttatgcattagcattccgtgacgtatacacattcggacctacattccgtgcagaaaactcaaacacaactcgccacgctgctgagttctggatggttgagcctgagattgcattcgctgaactaggggacgtaatgaaccttacagaagatatgctgaaatatgcaatgaaatacgtattagagcatgcaccagaagaaatggaattcttcaacagcttcgttgataaaacagttcttgagcgcatgaacaacgtaattaactctgacttcggtcgcatcacttatacagaagcaattaaagtgcttcaagaatcaggtgctgacttcaaatacccagtagaatggggaattgacttacaaacagagcacgaaagatacttatcagaagaaatcttcaaacgccctgtattcgtaactgactatccgaaagacattaaagcattctacatgcgtttaaatgaagacggtaaaacagtagctgctactgaccttctagttcctggcatcggcgaattaatcggcggaagccaacgtgaagaaagaatggacgttttagtagacagaattaaagaattaggtatgaacgaagaggactactggtggtacttagaacttagaaaatacggcggtacaaaacacgctggattcggtctaggtttcgagcgcttcctaatgtacatcactggtatggctaacatccgtgacgtaattccattcccaagaactccaggttcttctgaattctaaaatatgaaaaaaggcgagaggatttcctctcgctttttattttacatattgtatagtttattccctcgtagcaaaaagtaacgcgaaggggtgaatataaatgagtaaaaaagtgaaaaaagatcattcaagatcgggcctaggttctccagaagttgaaggacaaggaacgacgacacatgaaacaggttctcataaagtatcttcatcaaataagaagcagaaacgaagctaacataacaaaggagagtcttaagggctctcctttgttatgtgttacatcttattatcgttaatttcttttgtaatcttatttatgtctttgtctaatcgatctaaatagaaaaaccacagtaaactcatgaacacgtaatagatggccatcacgccaagattatcatatatattttcgaatgtggatttagtagtgaaaaaagctccccaaatgatagaaatagtgaggtaagaaagtggacctacgaggtgtacgaaagcatatcgtacctttttaacttttacagcgttcatatgaaaaacctcctttttctaatcatacattcaagttcttcacagaagtgttgtagttttgctggattatgtattaacaagcgtgcatcgtgtttcccgataaatcttcgaatccgaaagtttaataagaaagatcgaccataacgttctattaaatcgttgaacgctggttgtccacttagtagctgaatgttttctctaatttcgaactgtctttcgtgtggatcgcctagtaaaatatttagaatcatttgtagaagtagcaatgtagatctcctcctatgttagaataatctgtatattataattataacaaaactataaggacaatagtaggatgaaacaaaaaacaggagtttgtaggctcctgtttttgtcgatactattttaataagcgaagcgccttctccgtattagcgaaatgcagtttcacaaactcgggtaatcgttctttaccaagcttttgaattaatttagcagcagcgatatcaacttgtttaccagcacctttcggaagtggcataccagcttttttacttagttcgtcaaactgttttacgaatgagtagcgagctaaaatagaagcagcggctactgctaaatggacgctttcacctttcgtagcaaaataaacattttcacgctgtacctgtttttgttttgctaaatatttgtagtatgtatcaggttgtgtgaattggtcgattaagacgccttcaggttttgtaggtgccattttcgctaataagtttgtaatagctttattatgtagcaaggcttttaacttaccttggttgtttcctttatcaaatagctcgttatatttttcattatgaaggacaagagagctataaggaacaacgtgtagaagttgtttcgcaatggcaataatttgatcgtcatttaagtttttagagtcttttacaccaagttcttttagtagtggaatttgcttcgcatccacatatacagcaacgactgtcatcggtccaaagaaatctcccgtaccaacttcatcagaccctacaatagacattgtactgatggaagtaggcggcgcataacgatgggaatcgacagatttttttacagctgttttcggcgcgtgagagacagtttgccaacgagaagcttctgcttcagcgcggcctccttggaacattacttttccagatttatacgctgtaatcgtgcaagatggcaccttagccataaagataccgccttgcggaattttcgggctaagtgaatgtttatattgttgtttcatgtcttcaattactgtagaatttgtttgaattacgatagaatttgacataatggtcgcccctttttttatattgttatttttatcatatcggattgttctttctgtttccatattatgaaggttcatggtatgataaactttaggattctgtacgtgattggaggccggtgagttgtcacaacaaaagggaaagaaaagtcgaattaatgtagaaatctatggtcagcaatattcagttgttggcgatgaaagtacaagtcatatccgcatggtagcagcgattgtggatgataaaatgcgcgaactcaatgccaagaatccttcgcttgacacgagtagactagcggtattgacggcggtaaacgtcatacacgattacataaaattaaaagaagaacatgagaaattgaaagaaagtatgacaaaaaaaggaatggaataacatgattgatattattatcattttactgcttgttatgggatttttcctcggcttacgcagagggtttattctgcaacttgtaaagttaacaagctttattatcgcataccttgttgcatactggtactgtaaagatttagcgccagcacttgcgaaatttattccgtatccatttgataaaaacgtatctgttccagaatggattgatgcaaataatattgagacagtattttatcaagcgcttgcgtttatcatattgtttattattacaaaaatagcactttcattacttggtaatttgttaaatatgtttgcagaaataccggttttaaagcaagtaaatgcgtttgcgggggcaatcctcggatttttagaagtatatattgttttgtttgtcttaattatcattggaaacattcttccgattgaacaagtacaaacaccattacaaaaatcatcaattagcaaaataattgtagacgatacaccgattctatctgaaaaggtgaaggaactatggcagacaggtagcagagtataacttctcttttttcggaaagagaagtttttttctatgaaagaaaggcggggtaatgatgaaagtaaataaaaaacaagttatcaaattattagagacaatcgggctttttatggaactaaagggtgcgaatccatttaaaatatctgcatttcgtaaagcggcagcagcattagaaagtgacgatcgtagtctttctgagattgaagatttcacaaagattccgggcatcggaaaaggaacagcagccgttattcaagaatatatagaatcgggaacatctgaagtattacaagaacttgaaaaagaagtaccgagtagcttattgccgttattaaaactaccaggtcttggtggtaaaaaggtggctaagttatataaagagctaggcgttattgatatggagacgttaaaagctgcttgtgaggaaaataaagtacaagctttagctggtttcggtaagaagacagaagagaaaatattagaagcaatcgatcaagtaggctctcgtccagagcgtttaccaattgcgatggtattgcctattgccggggaaatagaggagaaattgtcgaatattgctgaagtaattcgtttctctcgcgctggtagtttgcgccgtgttcgtgaaacagtgaaagatttagattttatcattgcaacgacagaaccagcaacggtacgtgagcatttactacaattcgataatatgattgaggtaatcgcaagtggggatacgaaagtttctgttcgtcttcaatatgaatatgatatttcaatcgatttccgcttagtaaaaccagaagagtttattacaacacttcaccatttcacaggatcaaaagaccataacgtaaaaatgcgtcaaatcgcaaaagataaaggcgagaaaattagtgagtacggtgtagagaacttagaaacaggtgaagtgaaaacatttgagactgaagaagacttctttgctcatttcggtctaccatttattccgccagaagtgcgtgaagatggaaaagaaattgaattaattaaagagtatccgaacttaattcagttttccgatatacaaggtgatttacatatgcatacaacttggagtgacggtgctttttctattgaagaaatggtacaagcgtgccgtgctcgtggatataagtttatggcgattactgatcactcgcaatacttaaaagtagcgaatggtttaacgaaagagcgtcttcgtgagcaagcgaaagaaattgaacgtatgaatgaaaagtatccagacattacaattttacgcggaattgaaatggacattttaccagatgcctcgcttgattttgatgatgaagtattagaagaattagactatgttattggagcgattcactctagcttctcacaagaccgtgaaacgatcatgaagcgtctgcgtactgcacttgagaataaacatgtcacaatgattgctcatccgacaggacgtcttctcgggcgccgtgagggttatgatgtagatacagatttattaattgaactcgcaaaagagacaaatacagttttagaattaaatgcgaatccgaaccgtctagatttaagcgctaaattattaaaacaagcacaagatgctggtgtaaaagtagcgattaatacagatgctcatacacttgaaatgttagaagatatggaaacaggtgtagcagcagcacgtaaaggttggattcaaaaagataacgtgattaacacatgggatattgaacgtttattagactatattaaacgtaataagtaacgcaagggggacctgcaacatgttagaaagaacgttgcgtgtattagaatacaataaagtaaaagaacaattacttgaacatacagcctcttcacttggccgtgacaaagtgaagcatttagtgccgagcactgattttgaagaaattgtagaaatgcaagatacaacggatgaagcagcgaaagttattcgtttaaaaggtagtgcaccattaggtggtattacggatattcgctcaaatgtgaagcgtgcaaaaattgggagtatgttaagtccaaatgaattacttgatattgcgaatacgatgtatggtagtcgtaatatgaaacgtttcattgaagatatggctgataacggtgtcgagcttccgattttagaaactcacgtcgctcaaattgtatctttatatgatttagaaaagaaaattacaaattgtatcggtgacggcggtgaagtagtcgatagcgcaagtgataaactgcgtggtattcgtactcaaattcgtactgcggaaagccgtattcgtgaaaaattagaaaatatgacgcgctcttcaaatgcgcaaaagatgctgtctgactcgattgtaacgattcgtaacgaacgttacgtaatcccagtaaaacaagaataccgcggcgtatatggtggtattgttcacgatcaatcagcttctggacaaacgttatttattgaaccgcaagtcattgtagaattaaataacgcactgcaagaagctcgtgtgaaagagaaacaagaaatcgaacgcatcttattgatgttaacagaagaagtggcagtagaagccgatatcgttttatcaaacgtagaagtagttgcgaatcttgatttcatttttgcgaaagctttttatgcaaagcgaattaaagcaacgaaaccaatcgtaaataacgagcgttatatggatttaagacaagctcgccatccgctaatcgatccagaaattattgtgccaaataacattatgttaggtaaagatttcacgacaattgttattacaggaccgaatacaggtggtaaaacagttacgctgaaaacagttggtatttgtgttttaatggcgcaatctggtcttcacattccagtaatggatgagtcagagatttgtgtgtttaaaaatatatttgctgatatcggtgatgagcaatcgattgaacaaagtttaagtacgttctcctcacatatggtgaacatcgttgatattttagaaaaagctgattttgaaagcttagttttattcgatgaattaggtgctggaacagacccacaagaaggggctgcactagcaatttcgattttagatgaagtatgtaatcgcggtgctcgcgttgttgcaacgacgcattatccagaattaaaagcatacggatataaccgtgagcaagttattaatgcgagtgttgagtttgatgtaaatacattaagtccaacttataaattattaatcggtgtaccaggccgtagtaatgcctttgaaatttcgaaacgtcttggattatctgatcgcgttattgaccaagcacgcaaccacattagtacagatacgaataaaattgaaaatatgattgcgaagttagaagaaagccagaagaacgcagagcgtgactggaacgaagcagaagcacttcgcaaacaatctgaaaaacttcatcgtgaattacaacgtcaaattattgaatttaacgaagatcgcgatgaacgattattaaaagcgcaaaaagaaggggaagaaaaagtcgaagctgcaaagaaagaagcagaaggcattattcaagaacttcgtcaattgcgtaaagcacagcttgcaaacgtgaaagaccacgagttaattgaagcgaagagccgtctagaaggcgcagcaccagagcttgttaagaaacaaaaagtaaacgtgaaaaacactgcgccgaaacaacagttacgtgcaggtgatgaagtaaaagtattaacgttcggtcaaaaaggtcaattacttgaaaaagtaagcgatactgagtggagcgtacaaatcggtattctgaagatgaaagtaaaagaatctaacatggaatacattaacacaccgaagcaaacagagaaaaaagcagttgcaacggtaaaaggtagagactatcacgtttcattagaacttgaccttcgtggtgagcgatttgaaaatgcaatggcgcgcgttgagaaatacttagacgatgcccagcttgcaagctatcctcgcgtatcaattattcacggtaaagggacaggagcacttcgccaaggtgtacaagattacttgaagaagcatcgcggtgtaaaaaccttccgttacggtgacatgggcgagggaggcctaggcgtaacagttgtcgaattaaaatagaaaacaacgaaacaaaggggaaaccattatatgtttatggacaaacttgcaaaagtattgttagcttgttgcggaatatttttggtgattggggttatttatttagttgtttttgcgaagtgaaaaagcgtcaatcgtggcagaatgatattgccatagattgacgcttttaatatatgtgaaaaggaatagaacatgaaaatcaaccaatacataagcgaagcaaaatcatgctccagacgtgaaacagatcgcctcattaaagctggacgcgtggctattaatggtgaaatatgtacgcacggtgaacttgtgagcgatggtgatgttgtaacgattgatgggcaagttattgtaaaagaagagaaagaaaaggtgtacatagcctttcataaaccagtcggaattacttgtacagcagctgatcatattgaagataatattattgattatatcaattatccagagcgaatctttccagttggacgattagataaagtatcggaaggacttatcttattaacgaatgacggcggcattgcgaatcgaattttacatggtgatcatgagcacgagaaggaatatgttgtcacagtcgataaaccttttacggactggtttattaatgagatgtccagcggtgtaaagattaaagatggaatgacgaagccgtgcaaagtgacaagagtcgatcaatcaacatttcgtatcgttttaacgcaaggaatgaacaggcaaattcgtagaatgagtcgtgctttcggatttactgtaataaagctaaagcgagtacgcattatgaatatagagctaaatgagcttgaagttggaaagtggcggagcgttacagctgaagagttagaaattttaatagggcagttatagggagggaaaattttctccctatatttttttgtcagaaaaaataaaactattgattttttaaaaaatagcccatataataaaaaacaacaagtttcgacaagatattttataaaagtaatgatgaggacatgagttgtattttacgattctcagagagggaagccttaggctgtgagcttcctaatacgaaaagacaagcttaccacctctaaacttcaagagtgaactgcatacatgatgcattgtaattcttggcggataaaaccgttatcaatttacacgagctataaaatgagcttatttcgttatgaattcattttattagaataagggtggaaccacgatttcaacactcgtccctttgttagggacgggtgttttttgcgttcttttacggggaagtatgcttgaaagaggatatgtgacggattttaattcagaatattttgttaattaattattttaggaggttagtaggaatgaaatcatctttaaagttttcggagatgtttgcaataagtttaatgttatttgcactgttttttggtgcaggtaatatgatttttccaccagcgttagggcaaggtgctggaacggacgtatggatcgcgctgtttggttttatcgtaacaggcgttggactacctttattaggagtaattgttatagctttaaagggagatattaatgagctagcaggacgtgtacatcctatattcgcacttgtttttatcactgcaatttatttatgtttaggcgtattcgtaagtgtaccgcgtacaggaacagtagcttatgagatgagtgttgcaccgtttttaccaagtgagatagctggtcagtcatatccacttgttatctttacacttattttctttgcagtcactttctatttagctttaaatccttcgaaattagtgggtcgtattggtaaggtgctaactccaatattattagctgttattgcaattatcgtaggtaaagcacttattacaccaattggagaatttggtgcaccgacagaagcgtatagtgctcctctctttaaaggatttattgatggatatttaactttagatggacttgcagcactggtattcggaaatgttgtaattcatgcgttaaaagaaaaaggaattacaaataaaaacagtattgcaaaagtaacaatctttgcaggatttattgcagcacttggtctactacttgtgtatttagcacttgcttatcttggagcttctagtgtgtcacttggaatgggcgcaaacggaggaattattttaacaaatgtcgtgaatcatttatttggtagctacggaactttattactagggatcgcaattacagcagcatgtttaacaacttctgtaggtattgttgcagcttgtggtgattacttctcttccttattaccaaagctttcttatcaaaaagtcgttttcattttctgtgtattagcatttatggtagcaaaccttgggttaactcagttaaatgcattagcattaccaatcttaatcgcaatttatccaattggaatcgtacttatcgtattatcacttgttgaaaactacgttcgtcttccattagcgatgtatgtgggcgggattgtaggagcatttgcaataagtttctttgatggattacacaatgcaaaccttcaaattgcagcgctagcacctattttagataagattccattatatagtgtaggaattggttggttagttccaggcataatcggtataggatttggttatatagtttctaagtttcaaaagcaggaaattgctgtagaaaaatagagaaaagaggctttctattatagaaagtctctttttttgtaaaaaaagccgtatatagagaaattcagatattaaaaattttatacgtaatatagttgacaaaaaatttatgagtaggctaagattgacttagttgtggaaatattggaagggaagtgagggaaaaggggtttctataactatagtgttgttgtgggaagaggtgaaagaagaggagaagagatagtttatttttttttgatttacattgagaatgataatcaataaatgcgttttatcattttttctcagtttctatgccttcgtataaggaatagggtgagatattatttttaatattcaatgagaatgataatcaataatacttatgttacataaaagaatgctaattaaataataggtagaagagattattttttttcttataaattgagaataattatcattttcaaaaagtgaaatgaaagataaccaaggaggaaacaagaaaaatgaaaaaggtttctgtattacccgcttttattataacgttcgtatgtatgctagcttttcttgtaatgccatacgggaatgcttcagcaaaactagctgatggtacttacgatattaattacgtaattcaaaaagcggaaaatgattcagcttcaatggcaaatgactattttgaaaagccggcaaaattaatagtgaaaaacggtgagatgagagtacaagttccgatgaatcatagtgcttggattacagaatttaaagcaccagagaatggggattttgttgatgcgaaagttgttagtaaagatgaatcggcagataaaagaacagtagagtttaaagtagatgatttatccaaaccggcagctgtaaaaattcatgttgttgtaccaaatgcaaactatgaccaccactacacaattcgttttgcttttgatgcaaatgtaaaagctgtaggtggcgataacggcgtagctgctacaacaaaaaataatgatcaagcgaaaacagatacacaagtaaaagaagagaaaacaaaagtagagagtaaggaaacagctaaagaagtgaacaaagaaacaaaaaatgaaaatggaaaagctgaaaaaacagataacccaaaaacaggcgatgaagcacgtattggattgtttgtagcgttaattcttatttcaggtgctttcttaattcgtaaagtgaagttgagtaaataaatcttttgaagggggatgaatatatgtttaaacaatttaaaatgattattgctgtatttgctgttttatttacgtttatcgcaacactaggtttacaagatgcaaaggctgctacaaaactagctgatggaaaatataatattgcttttactgtatggaaaggcgataaagatgaatcgtctagaatgaatagttattttgaaagcccagcaacattaacagttaaaaatggaaaacaatatgtttcatttaaagtgaaagatagtgcttctattaaaagtttccaagtagaaaaagatggtcaatttgtagaaacaaacgtgttaagtgaaaacaaaaaagataatactagagtagtagaatttgaagttgctgacttgtcaaaaaaactaaatggaaaggtggaaattaatattccaattattaattataatgcttcatatgatattcgctttgtatttgatgggagcagtattaaataattttcaaaagggagagtcgttccattgaacaggtatacaaaaattattgttgctatgtttttaatgatatttacattcgtatcaacattacaaccacttgcagttcaagcagctaccaagttggctgacggtgaatattcaattgggttcaaagttttaaaagatacatcagatgaagaatcaatgatgaatcaatattcagtaagtccgggaactttaaaagtgaaggatgggaaaaagaaagtatcctttacattaacgaatagttcatggattacgaagtttgaaacagaaaaagcaggtaagctagttgcgacaaatgtaattagtgaagataaagaaaaagatacaagagtagtagaatttgatgtagaagatatagagaaggtattaaatgcaaaagtaaaagtagatattgattttttaaattatcatcatgagtacgacgttcgtattgcatttgatcaaaatagcattacaccaattcatgtagaaaaaccaaatgaaaaagaggacccagctaataagccagatccaaatgaaactaccgatccaggtcagaagcccgaccaaaagcctgacccagatcaacaaccaaattctaacacaattacagatggtacgtacagcattccatttaaagtattaaaagatcaaacagatgaagaatctaagatgaatacttacatggtaaatccaggagtattaaaagtagaaaacggtaagaaaaaagcaattgtaacactaaaaagtagctcattaattaaaaatttccaaacggaaaaagatggcgcatttgttgatgcaaaagtagtgagtgaggataaggaaaaagatacaagagtagtagagtttgaagtaaacgatttatctaaaaaactaaatacaaaagtatttatcgaaatggcatcaagaaattataagcaaacgcatgatgtacaacttttatttgaacaagataaacttgaacaaattaaaaatgaagagaaacaaccagaagcagaaaaaccggaagcagaaaaaccggaagtagaaaaaccagatgaaaataaaaaaccagatgctgaaacaattaaagatggtgaatacagcatcaatttcaaagcattaaaagatcaaacagacgaaatttcaatgatgaacacatatacaaaaagtccaggtgtgctaaaagtaaaagatggtaagaagtatgtatcatttacgttaacgaacagttcttggattacaaaatttgaatttgagaaaaatggttcgtttgttgatgcacatgtaataagtgaagataaaaaagctgatacacgcgtagtggaagtagaagtaccagatttatcaaaaaagttaaatgcaaaagtaaaagtagatatcgattcaatgaattatcaccatttttacgatattcaatttgcatttgataaaggtagcattaagccgttagatagccaaggcggaaacaacaaccaaggcggaaacgacaaccaaggcggaaacaacaaccaaggcggaaacgacaaccaaggcggaaacgacaaccaaggcggaaacgacaaccaaggcggaaacgacaaccaaggcggaaacgacaaccaaggcggaaacgacaaccaaggcggaaacgacaaccaaggtggaaacaacaaccaagatgaaaataataaaccgagagtaatagttgattcgaaaaatttagtagatggccaatatgatattacatttaaagtattaaaagataaaacagatgagatttcaaagatgcatgactatgttgtaaatccagcgaaattaatcgtaaaagatggtaaaaaatatattgagatgacgctgaaaaatagtgcgtggattacgaaattccaagcggaaaacaatgaactattcgctgatgcgaaagtagtaagcgaagataaaaatgcaaatacgcgagtagtacagtttgaagtagaagatctatttaaaaaattaaacgcaaaagtaaaggtagacatcgatgagatgaactaccatcatttctacgatgtacaaattcaatttgatacaaataatatcggcgcgttaggaactattaaagaggaaccgaaaaatgaaccgaaaaatccagtgactacaccgaaagtagataatgtaaaaacagtaggtactcctgattttaaccgaaatgcagatggtcagaagaaaaaagaagatacaaaaaatgattcaaaaaaagagaaaaactcaaaaactgcagatacagcacaacttggtttatacatggtgttactgctaggttcacttgctttactagttcgtaaatatagagcaggtagattgtaatttttggagtcttgatgcatgttcgcgtgcatcaagacttgtttcatattgtatggaaaggagtggtgattgagagtgaagaaaattgcaagtgtactaatggctatcattttgttaatgggtatagccgggtgctcatcaccaaaaaaagaatcagcaaagcaggtaaagagtgaaagtaaagagcacgttgttgcaacaacagtggctgttactgaaattatggatgcgttagaagtagatttagtcggcgttccaacaagttctaaaactttaccgaagcgatataaaggtttacctgaagttgggaatccaatgagtccagatatggaaaaggtaaagtcattaaagccttcagaagtgttatctgtgacaacacttgaatatgaattaaagccagtttttgatggtgtgggtatgaaagcaaactttttagatttaacgagtttgaaaaatatgcaaagttctattagcgatttaggtaagaaatatgggcgtgaaaaacaggccgaagcagtagtaactaaattagataaaaaggttgctagcattcaaaaagaagtaaaaggaaagaaagaaccgacagtgcttattttattaggtgtgccgggaagttatttagtagcaacagagcattcttatattggagatttagtgaaacaactaggtggtaaaaatattgtgcaaggtgaacaagtagaatatttagcttctaatacagagtatttaaagaaagctgatccagatattattttacgagcagctcatggtatgcctgatgaagttgtaaaaatgtttgataaagaatttaaaacaaatgatatttggaaacactttgctgcggttaaaaataaccgtgtttacgatttagaagagcgtttatttggaacgacaggtaatttagcagcaattgaagcattagatgaattgaaaaaaatgatgtatccgtgatgcattttaatataaaggaagagtagaatgaataaaaaaacttggagtttcctcattgttactgcattgcttattgttatgacatcattgtcagcgatgaaaggtagtttagaagtaggtattgttgaacttgtacaagggatatttacaggtggaaatgaagatgttgaagtcattaaagatttacgttttccgcgtattattattgcgttgttcactggagcggctctcgctgtttcaggtgtgctttttcaagctgttatgaaaaatccactcgctgatgctggggtaatcggtatatcttcaggagcaagttttatgacactcgttattattacgttgttcccgcaattctttttctggacacccgtattcgcctttttaggtggtgcgcttgcatgttatctcgtttattcgttttcatggaaatcaggattaagcccgcttcgcattattttaattggtattgccattaatgcaatgtttactggattaaatgaatcattcgttacgatttgtggatattttattaagagtattaagcaaacgacgacttctaacataacaatgaagacgtggggcgatgtagaaataatggtgacttatggaacgattggtcttattcttgctctgttcgtaggagcttggtgtaacttattatcgctacaagataagactgcgaaaaacttaggcttgcacgtgacgagagttcgtcttattatttctgccattgcagtactcttagcggcagtatcaacagcgattgcaggtgttattgcttttgtaggattactagttccgcatatttcaagacaattagtcggttcagaccataaagtattaattccattttctgctcttgcaggggcgttattaattttgacggcagatacgattggaaggttaattgtgccacctaacgaaattccagcagcaacaattatggcggttattggtggtccattcttaatattcttgcttggaaagagtgataaagttcatggaaattaaaaatgtaaccttttcatacgataacgtaacaaatcgattaaagtctgttagtagtgaaatagaaattgggaaaattacaacaatcattggaccgaatggatgtgggaaatcaacattacttagtgtcatgtctagaaaccacgctcctagcagtggagaagtaatacttgatgggaaagcgattagtgaatataaaccgaaagagtttgctagaaaactagcggttgtccatcaacaaaatgaggctccagcagatattacagtggaaaagctaataagcttcgggcgtatgccatataaaaatatattctctccgcaaacagatgaagatagagaagcgattgagcgtgcgctagtatgtacgaatttacaaagtaagcgtgataagccaatttatgctttatctggtggagagaggcagcgagtttggatcgcaatgacattagctcaaaatacaccaatgctcttcttagatgagccgaccacatatttagatatttactatcagctagaaatattagagttagtgaaagagttaaatgaagtgcatggactaacgattgtaatggtattacatgatattaatcaagccattcgttatagcgaccatattatcgttatgaaagatggagaaatcattacgaaaggtaatcctaatgatgtaataacagaagaaatgattaaagcaatatatggtgtagatgtcattgtaaagcaggatgaagataccggattgtacatggtacctatgggaatctaaaggctgagcataatccgttttgaggtgataatttgaatagtaagaaaggacggaaaaagaattctttttttcaacgcatacttacaattgtgtttttaggaatctttttctattcaatgtatgagttgggcgggattttcatggattattatgaaaatcgtaaagtaatggctgaggcacaacatatttataaaagaagtccaatggaagaaaaatcagaagatggagaggtacgtaaacagtttcaggatctccagaaaattaatccagagatagtcggatggattacgatggatgatacacaaattaattatccaatcgttcaagcaaaagataatgattactatttatttcgtaattataaaggtgaagatatgagagcgggaagcatttttatggaccatcgtaatgatgtgaaatctcaaaatcgaaatacgattttatatggccatcgtatgaaagacggttctatgtttggtagtttaaaaaagatgttggatgaagacttttttatgtctcatcgtaaattatattacgatacattatttgaaggatacgacgtggaagttttttcagtatacacgacaacaacggacttttattacattgaaacggattttgaaaatgatgcagcatatacatcgttcttaaaggaaattcaagaaaaatcactgtacaaaacggatacggaattgacggctaatgatgaaatcgtaacactttctacttgtgactatgcgcttgatccagaggctggaaggctagttgtacacgcaaaattaataaaaagaaattaaagaaaaaagtatagaatatgagaagtgatagataacgcttctcatattctatactttaaaaaaggactgtttttactgtgctgcagccattggcatacgtacaacttttacatcatagtaagcaattttattatcaagaatatattctggcattccgccttgatgtgagtgagcatctttaaatgcagcgctctttgtccaaccttggaaatcttcttttgcattccagcgagtgctaattgttacttcatcataatcaactgtattttgcgttaaaagaacttctagacctaaaaagcctggcatcgtttcaactttacctactttattaaaacgctcaattaatttatatccatttccctttgtaattttagctgtatttgtaacgataatcatgtttattcctcctataaatatagcctttattttcgagaactcatatacattaaatgataatgaaaatcattatcattgtcaatgctaaatgtgaaatataaaagttttttatattatattggacagtaagatttccagttcaaaatgtagtaaatatgtggcagttaagcgagagaatgagcgagttgtactagcaaagcaataatatggtatagtgaaacgaggctgttttttcagtctcgttttttaaatgcttcctgtagagaaagcatgcaaatggaaaggaagttattatatgcgatcagaagtaactgtaaaaataaaaccgaaatttataaaagaaattaaaagtggatatccgcttattttaaaagatgcgattcaaaatttaaatgatgttcgtgaagaaggaacaatcattaaagtagtagatgagaagaaccaatttatcggaaaaggctattatggaaaacaaaataaagggtacggctggattttaacgagaaaagagagtgaacaaattaatcaatctttctttgaaagtaaaatcaaatctgccttacataaacgaaagcaattttacaaatcaagtgatacgacagcattccgtgtggtgaatggtgaaggtgatggtcttggaggactaattatcgattattatgatggctattatgtagtaagttggtatagtgaagggatttatactttcagagatgagattatagccgctcttcaaaaagtagcaaactttaaaggtatttatgagaaaaagcgttttgatacgaaagggaaatatattgagggggatgatttcgtagcaggagagcgcggcgagttcccacttatcgtaaaagaaaatggtgtaaactttgcggtgtatttaaatgatggggcaatggttggggtatttttagatcaacgtaacgttcgaaaacaaattcgtgataaatatgcaaaaggaagaacagtgttaaatatgttctcttatacaggtgctttctctgtatttgcagcgcttggcggagcgagtaaaacgacgagtgttgaccttgcaaatcgtagtttaagtaaaacgattgagcagtttagtgtaaatgaagttgattatgaagcgcaagatattattgtagaagatgtatttctttacttcaaatatgcagcgaagaaaaaaatgaaatttgatatggtcgtacttgaccctccaagctttgcacgctcaaaaaaatatacatttagtgcagcaaaagattataaaaatttattaaaagaaacaattgctattacagaaaataacggtattatcgttgcttctacaaattgtagcgcattcgatatgaaaaagtttaaaggctttatcgatacagcctttaaagaaatgaatggcaaatataaaatattagaagaacattctttaccagaagatttccgtaccattgatcaatttaaagaaggagactacttaaaagtagttttcatcgagaaaattaaaggttaataaagaaaaggagctcgagtttacttgagctccttttcttattgaacgatattttgtactctaccgacttgcccgtcctgcaatcgcactttaatgccatgcggatgggaaggggagtttgttaaaatatcttttacaattccacgtgttaatttgcctgttcgttgatcttgttttaatacaatatcaacttcaagaccgggggcgatattagaacgtttttgtccgttcatttatacacctgtacgtctacgttggttgtttgttttctttgtttgttggttttgtaatttttttgtttcttggctttgattttttgcattttgaccatttccatttccttgctttttcttagcaagttgttcacgcattaaatcagctaagcttacttttttgttttctgacatgataagtctcctttatataaagttaattatgaacaatcgtagtgaatttcatcatatcattgttaaggaaggaagggaagttggtttgaaaattcatataattgtttccagtctgtagtagttacgatacaattggattgttaacgtttgtaaaaaggggatagacatatgtcacatcatattttattagttgaagatgatatctcaattcaagagatggtggaaaagtatttaataaaggaaggctttcaagttacgattgcgtctgatggagaagaaggcgtgaacacatatttaaaaggttcatttgatttgattatccttgacattatgatgccaaagctagatggcttagaggttgtacgaatcattcgagaaaaaagtgcagttccgattttaatgatgtcggcaaaagatacagatgttgataaagctgttggattaggacttggagcagatgattacatttgtaagccgttttctatgattgaattggctgcacgtgtaaaagcaggtattcggaggtctacgaaatactcggctacagaaacaatagaaaaaatgattcaaattggtgatttaacaattgatccaattaattttactgtagaaaaaaacgggaagcctctcaaacttactttaaaagaatttgagattttaaagctattcgtaaagaaccaaaatcgtgtatttacgaaagcgcaaatatatacgttagtttggaatgaagagtattacggtgacgataacgttattaatgttcatatgagaagattgcgtgagaaaatcgaaagtgatccatctaatccagaatatattaaaacgctatggggcatcggctataagctggaagtgatgtaatatgatcaatttgttaataggtattatttttatattgttatgtgttatttatatgcaatataaaatgagaaaaaatagtagtaaaaatttacgatacacatatgaaaagttagaaagtattgtaaatgaaaaaacaggtgagacgttactcgttatgacagatgatctagaattgcaaaaattattagtggcgattaatcaattattagatgcaaaacagaaaacgaatgcagatcatgcaaaagtagaaatttcgatgagaaaaatgctttcaaatatttcgcatgacttgaaaacaccactaacagttattcttggatatacagaaatgttaaataaggataaaacgataaataaagaagaacaacaaatattacttgagaaagtgcatacgaaaacactagaagtgatggaattaattcataagttttttgatttagcgaaattagaatctggtgacaaagcaattgaaatgacaaaaataaatatgaatgaagtttgccgcgagaagattttatcattttatgatttagtgacgacgaaaggttttcaggttcatattgatataccagaaagaaatatatatgcacttggaaatgtagaagtattaggtagggtattgaataatttaatatcaaatgcaattacatatggagacgatggaaaggcactcggtatgacgttaagagatgatgacacgggcgtgtatatagatgtatgggataaaggaaaagggattgatgaatctcatattgataaagtgtttgagcgtatgtacacacttgaagattcaagaaatagattgtaccaaggaagcggtctaggattaacgattacgaaacggcttgtggaagcgatggacggaaaaattcatctttctagtaaaccgtatgaaaaaacaatttttacaattgcattaataaagatacagttttagcttgtagagcagtagattctacaagctttttttcagcgtaaggaatttgtaagaaacgggtaagaaaaaagagatttccgttgtctattatagaaatatagagtattgcgaaaggggaaagtaacatgacatatatattaaaaacaaaccagttaacgaaggtgtttaaagggaaagaagttatttccggtgttaacatgcatgtgaaaaaaggagaaatttacggttttttaggaccaaacggtgctggtaaaacaacgattatgaaaatgattacaaatttaataaaaccgacgagtggtgatattgaaatcttcggtgagaaattaacagatacatcttatgaagtattaaaaagaatggggacaattattgaatacccaatcttttatgataaattaacggcgaaagaaaacttagacctacattgtgaatacatgggctactacgataaaaatgcaattgaccatgctttacatttagtgaaactacaaggggtagataataaaaaagtaaaagatttttcattaggaatgaaacaacgactcggtattgcaagagcaatcgtgacaaagccagaattgctcattttagatgaaccaattaacggtttagatccaattggtattaaagagttacgagacttatttaaaatgctctgcaaagaatatggcattacattattagtttctagtcatattttaggtgaaatggaactaatggccgatacaattggtgtgattcaaaatggaaaactaataaaagaagtttcaatgaagagtattaacggaaaacaaacagagtacattgaaatcactgttcctgatgtgaaacgtgcagcttatattttagaagataaacttggtataaaaaactacaaaataatgagtggaaccatgattcgtgtgtatgatacgttagcgtctcagcaggccatttcaaaagcacttattatgaacgatgtggaaattgaaagtattaataagaaacatagttccttagaagaatatttcttaaatgtaatggatggagagggcattcatgcttaatggattgttagtgaatctactaagtggattgatcgtaatgttcataagtgggattttatattatagaaaacctgagcggaaatggttgttaattctaatagtaataggaatgttaagcttcgttactgctggaattagaatgttagcagcataaagacagttatataaagaatggaggagtggtttgtatgcttagattaatgaagctcgaatggaagaaacataaattatctagttactttaaaggggtagcaatttgtattatagcaattttcgctgcagtaagccttatggcgttgggaatgaaagccgagggagacgtgctcttctttgacttcacgcaacaaatggttttaataaacacttttattaggataacattcattatttttagttcggtcattttatcacgtttagtaattgatgagtataagaacaaaacgatgcaattatcgtttatgtacccgctgcaaaggaaaatgctaatgagggcgaaattaacaattgttttttgtttttgttttgtgagcacgattatcgctactttcagtatcagtttgcttgtatattttgtgagtccaatgatgggactgattgaaacaccagctacgataggtgaaataatatctatcgttccaactacttttataagtgcatttatgatatctggtataagtttaattcctttattttttgggatgagaaagaaatcgacacccacaacaattacttctgcagtaataatcggaatgctaattagtagtaactttggtcctggaaacggtcaagtaagtctgtttaattttatagctatcccaatagtgctctgtttattaggaattttcatcagttatctttcatatcgtaaaatcgataagattgatgtggtgtgaagcaagcttaaaacaacaatgaactggggtatgaatggtgaaaaagataatagtaattgcaatattattcattacaattgctagtgtagtttttggtattaaggtatttcaggggaaagattttaagaaagaaaagtcttttgagataaataatataaaagaaatagaagtagataatgaaaactggaatcttgaatttaaaagtacagacgctaataaaatagtaattttcgctcaaggtgaacaagcagataaagagatagatcctgtcaaaatagaaaatgatgaaaataaaattgtgattaagcaaaaacaaaagatgaacagattttttaatggtttcacgtttaggaagaaaaatagtatatctatagctattccgaagaaagaaatagataaaattgtagtaaataataaatcgggtgatgtgaaaataagagatatagtagtaaaaaatatcatgacaaaaggcaagtctggagatgaaatgattacaggactatcagccgagaaaggtgaatttatatcgcaaagtggagagttagttttaaaaggtagttcagtacaagaattaaatataaagtctacgactggtgataactatataacaaatgtaagtaactcaaatatgaacatcacatcaacatctggggaagtattactgaaagatatgacagaaggaaaatcattatttatagaaacaaaatcaggtgatattggcgtacggtataaaggtgtccctgcatcattgaagcttatggctaaaagtaattcggctgacgtaatagtggatttaaaaggacttaagaaagataaaaatacagacaaaataaaagtaggaacgattggtgatgcaaaaaatgaagcgaagattttaagtgaaacaggagtcatttatattgattaagtccaaggaggaaggaggaatatcatgctacgtcttatgaagttagaattgaagaaatttaagtttggatggtatgtgaggggagcagttattgcaaatattattatactggcattattaatctttgttagtttcattgcacaaatagaaggagatccagaaataagagatccgcagatgattttgttaatggctagtacagtagtaagagcaacatttattatttttggtagtgtattaatagcaaggttaataattgacgaatataaaaataaaacaatactactcatgttttcttatcccattaatcgaaagaaaatgatggctagtaagttggctattacagcgatagtaacatttataacagttattgtatctaacattttagtagtaggaattttctttgggatagatagttgtttttcaattcttcctcattcattcacagtagatcaattggtgcaagaaggaataaaactagttcctttagccattgcaactgcggggatgagtttaatcccattatatttcggaatgcgtaaacgttcagtgccaactacaattgtttcatctcttatcgttgtagcaattgcaatgaataccaacccagagtttcctacagcaactttacttccccttcaactagcactcgcagcaattggagctgtgattgcatattacggaattaaaaatatagagaaggaagatataacagtttgacaagaataaataaaaaaagagttggcgttacaccaactctttttttgtatatgtatgcttcggtactactctgtaaatttatagtgtttacttaaatactcttgcactcctggagaaatgttaaagttattaggacttttatattcgatagtaaactctccgtctccacttgtttcaaaggcgattgcatagctattcattttagcatcgtaagaagtgtttttgacttctgcatctagattaaaatattttgtaatatattcttttgattccgtaattgctgcttgttttccccaaggggtaccataataggtgaaataaagagatacactaataactccaataatagaagttaataaaatagtgcccatagctatttttttattctttgtattcaatttggttactcctcttcatagtatgtattcattttaacctatcttttccataaaacaactattaagaaaaaatagtttcacatgaaacaagttacagaaaaagacaagatatgtaaacatcttgtcttttttgtcgttacattttaggagcttccattccagccgcagcccattcttcttttgcggggccatatacgccaggaactgttaagccagcttgtcgcattaaaaccgtcatttgtccgcggtggtgattttgatgattaatgagtgtcattaaaaatatagaattcggcatagggcgaccaaagaagtcattaatagtagctaagtctttatcagtccatttactttgaagtgtttcaacaaaagccgcgtttactttacggtattcatctgcaattgtttttgcagaagttggaacaggataatctttcgtttctccttcaaactttagccctgtgccagatagtatcacaggaactgccgtcacgatgtgccaagcaattcttcctaacgtccagtgcccaggtgcaatttcctgtgataaagatgcatcggttaatgaatcaagcattttctgagtagactcagcctcgtatgtccatgattgtaaaaagccttcaattgtttggtacatagttatccctcctatttttgttcatagattaaattcgtgagagataatataatccctgttccacaagaaataattaattaagcattgctacaatatgaaaacaattagaaaatatttgtaaaagtgtcaggaaacgaatgtgctcattcgtatatataatgaataaagaatgggataaagagtggtgataagggtgaaggatatagaaatagtagaaggtcttcgaaaacaagatatgttagcattacatacagcgattgatcgatatggagatttaatttataaggtagttcatagtattttagatacggcacatagtaaggtgttagtggatgaatgtgttgacgatattttattaatcgtttggtacaacattagtagttatgatgaaaatcgtgggaagtttagaaactggcttatatctgtcgctaagtttaaagccattgattataaacgaaaaagtaataaggcttatcaattacaagagtttcagcaagaaagatatgaagatagaaaaaatgtcaatttaacaaaagaagagagagattataatttttacgttttaattaaagaattgaatgaagaagataagaaaatttttataaaaaggtatttagatgaatatagcgtacaagaaatagcgcttgaattcggtatgacacgagatacggtatatagcaggctgtcaagagggagaaagaaattgaagaagctgttgggggggaaaagcaatgaataaagaaaagttacttcaggaattaaataacttacagtatagcgataattttgtagatgattatagaaatgatgagaaaatagataaaacgaaaatagatcgtacaaaagaaactgtaaccaaaacaattttaatgaaacgttgttatgaggttgtacaagaagagttacagggaagcgaagagattttatatagtatgcttgccgaaaatcatcatgtgaaaaattggcagacaggcacagccatgacattaggggtaggcgttcttgcaatgaacttcggtattaataatgtgttaatcgttacaaataaacggttgtatgtgttttttatggatcgttattataatgaagttgatttaaaggtatgtgtattgaatgaagtagcttatatgaaaacaatattagaccgtaaaggtggaagcgagtttctgcatataaagtataaaaatgataaggaatacgtattattgggaaatgctgatgattacagagagttatttcaaatagtaggtaggttgaaaatagcaaatggaatagaattgagattacaagataagaaattaaagagaaagttaactttaaaacgaagtgtattcaatataatcatgtatttacttgttatatatattatgtacaaagcctatattaattttctgccataataggaaaagacggcttcacatatatgaagccgtcttttaattaactttcttcccacttttcctcatcaaccataagaaataaggtgttccaagtatagcaacttttttcgccggtttatctaattttgtttccccttcagtatgtttaattgttatagtttgctttttatcttctatcgttgttacctttttctcctcttttttgctgtccgcattcaacagcgaatagaagaacaaccatgaaaatactaagaattttcttcatcttctttcccaaaataagttttttattcgtaattatatttttaaaattttgctgaaaaataacgaattatacgaatatcgttatgtaagattaaaatccatatgtgtatgaagaatttagaaaaggaatttcatttaactagagaggcgaaagtacaagcaaaaggagatagtatcgcatgtaataattattagaatgtacgggataaatctatatttatctccactgaataaagctttcggtctgatttgataaatgttttttaatttcttacttgtacttataagattgaatttgaaggaaggaatcaacatgtcttcatggctcaataatacaaatggatattgtagttgtaataatcaaaatggtgtacatgttgattcgtgttgttttagttgtgatgggacagtccctaagcttggtccaacaggtccaacgggagcaacgggttcaacaggagcaacgggttcaacaggtccaaccggagcgacaggttcaacaggtccgacgggagcaacgggagcaacaggagcaacgggtgtaacaggagcaacaggtccgacgggatcaacaggtccgacgggatcaacaggtccaacgggttcaacaggtccgacgggatcaacaggtccaacgggagcaacgggttcaaccggttcaacaggtccaacaggtccaacaggtccaacgggatcaacaggtccaacgggagcaacaggtccaacgggagcaacaggtccgacgggttcaacaggtccgacgggagcaacgggttcaaccggttcaacaggtccaacaggtccaacgggagcaacaggtccaacaggatcaacgggagcaacaggttcaacaggatcgacgggagcaacaggtccaacgggagcaacaggtccgacgggttcaacaggtccgacgggatcaacaggtccaacgggttcaacaggtccaacaggatcgacgggatcaacaggtccaacgggttcaaccggtccgacgggttcaacaggttcaaccggagcgacaggttcaacaggttcaacaggtccgacgggagcaacaggtccaacaggatcaacgggagcaacaggtccaacgggagcgacaggttcaacaggttcaacaggttcaacaggtccaacgggagcgacaggctcaacgggagtaacaggtccaacgggagcaacgggatcaacaggagcaacaggtccaacgggttcaacaggctcaacaggtccaacgggagcaacaggtccgacgggagcaacaggtccaacgggatcaacgggttcaacaggatcaacaggtccgacgggagcgacaggtccaacgggatcaacgggttcaacaggtccaaccggagcaacaggtacaagtatcacggcgacatatgcatttgcaaataatacgtcgggaacagcgatatctgtagttcttggtggaacgaatgtcccgcttccaaataatcaaaacatcggtccaggaattactgtttctggtggaaacacagtatttacggttgcaaatgctggtaattattatatttcatatacaattaatataacggcttcattattagtcagttcacggattacaattaatggaggggcacttgctgggacgattaatgctcctgcggtagcaaccacatcatttagtgcaacaatcattacaactcttgcagcaggagatgctattagcttgcaattatttggtttgttagctgtcgcaacattatcaacaactactccaggagcagtgttaacgataataagattaagttaaactataactctcttactcttttaagattaagagagtttctacatataataagaagttaatgaagtaaagcatagttatacaaaagtcagaatattatgattgtaacgctatggtgactataatataatgaaaataaccatcatgaatgaacattcatttatttttatgtatttgaagggggaatgaaggtggaaaaaccatggttgaaaagttatccagaggaaattccgagtacgatttcttatgatattcagccgcttcatagatatgtagaacagatggcttctcgctacccagaaaagaaagcgcttcactttttagggaaggatattacgttttcggacttccatgataaggtgaagaggtttgcaaattatcttcaaaagctcggtgtggaaaagggtgatcgagttgctattatgttgccgaattgtccgcaagctgtaattggttattacggcacattacttgcgggaggtatcgtagtacaaacaaatccactgtatacagagagagaattagaatatcagcttcatgactcgggagcaaaagtaattctttgtctcgatttagtgtttccaagagtaacgaatgttcaatctgctacaaaaattgagcatattatcgtaactcgtattgcggactttttaccattccctaaaaatctattgtatccatttgtgcagaaaaaacagtcaaatttagttgtgaaagtatcagagagtgaaacgattcatctttggaattcagtagaaaaagaagtgaatacggatgttgaggagccttgtgatcctgaaaatgatctagctcttttacagtacacaggaggaacaaccggatttccgaaaggcgttatgttaacgcataaaaacctcgtctctaacacgttaatgggagttcaatggttatataattgcaaagaaggagaagaagtcgttcttggggttcttccatttttccacgtgtacggcatgacggctgttatgaatttgagtgttatgcaaggatacaaaatggtccttattccaaagtttgatatgaaaatggtttttgaagcgattaagaagcataaagtgacactatttccaggggcaccaactatttatatcgctcttttaaatagcccacttttaaaagaatacgatatttcttctattcgtgcttgtattagtggatcagcaccactgccagtagaagtacaggaaaagttcgaaacagttacaggtggtaaactagtagagggatatggtttaacagaatcctctccagttacacatagtaattttttatgggaaaagcgagtgccaggtagcattggagttccgtggccagatacagaagcaatcattatgtcacttgagactggtgaggcattaccgccaggagaaataggggaaattgtagtgaaaggtcctcaaattatgaaaggatactggaataagccagaggaaacagcggctgtattgcaagatggctggctccatacaggtgatgttggctacatggatgaagatggatttttctatgtaaaagatcgcaagaaagatatgattgtcgcgagtggatttaatgtgtatcctcgtgaagttgaagaagtattatatgagcatgaaaaagtgcaagaagtagtgacaattggagttccagatccgtaccgaggagagacagttaaagcatttgttgtgttaaaagaaggtacggagtgctctgaggaagaattaaatcagtttgcacgtaaatatttagcggcttataaagtgccgaaagtatatgagtttagagatgaattgccgaaaacgacagtagggaaaattttgcgccgtgttctaatagatgaagagaagagaaagaatgaggatgagcaaacgggctaaggccctttctttttgaaaaaataggattgacacttttctaaatagtcagtattataagaatatgaatgactattcattcagtcatcttcttgaaggggacagtaaagtgaagaaaaatagaccgaaatacaatcaaattattgatgcggcagtcattgtgattgcggagaatgggtaccaccaagcgcaagtttctaaaatcgcaaagcaagctggggtagctgatggcacgatttatttatattttaaaaataaagaagatatattaatatccttattccaagagaagatgggagaatttgtcgaaacaattcgtcaaaaaacagcaggaattgaaagcgctgtatcgaagttattcatgttggtagaaacgcacttcttgctgttgtcgcaaaatgatcctcttgctatcgttacgcaattagagctgaggcagtccaatcaagacttgcgccttaaaataaatgaagtattaaaaggctacttacaagttatggatgagattttagagactggtataaaacaaggtgaatttcaagcagatttaaatgttcgcgtggcaagacaaatgatctttggaacagtggatgaagttgtgaccaattgggtaatgagcgatcataagtatgatctggtcgcactttcaaaaacggtacacgggctacttattgcagcttgtggttatcgtcaataatgggagggatcatgttgaaattcctatctgtaagagttgaagatcatatcgcggtggcgacgttaaatcacgcaccagcgaatgcgatgtcttcacaagttatgcatgacgttactgaattaattgatcaagtggaaaaggatgataacattcgtgttgttgttattcatggtgaaggacgtttcttctcagcgggagcagatattaaagaatttacatctgttactgaagcgaagcaagcaacagaattagcacagcttggacaagttacgtttgagcgtgttgaaaaatgttcaaaaccagttattgcggcaattcatggagcggcactgggcggcggccttgagtttgctatgtcttgccacatgcgctttgcaactgaaagtgcaaaacttggtttacctgaattaacacttggattaattcctggctttgcaggtacacagcgcttaccacgttatgttgggaaagcgaaagcttgtgaaatgatgttaacaagcacaccaattactggtgcagaagcattaaagtggggacttgttaacggattgttctctgaagaatctcttttagatgatacgcttaaagttgcaaaacaaattgctggaaaaagtccagcaacaactcgtgctgtactagagttattgcaaacgacaaaatcgtctcattactatgaaggtgtacaacgtgaatcacagatttttggtgaagtatttacgagtgaagatggaagagaaggtgtagctgcatttttagaaaagcgtaaaccttcatttagtggcaggtagttcaattatttttttaatataaattaacagaaaattaaaattgatagaatctttctgaaaaacaagggggtaaatggaatgaacatctacgtactcatgaaacgaacatttgatacagaagaaaaaatcgtaattaaaaacggtgcaatttacgatggcgaagcggaattcatcatcaacccttacgatgaatatgcaattgaagaagcaattcaagtaagagacgcacaaggtggagaagttacagttgtaacagtcggtggcgaagatagtgagaaagaacttcgtactgcattagcaatgggctgtgataaagctgtattaattaatattgaagatgacgtagaaaatggtgaccagttcacgacagcaaaagtgcttgctgaatatttaaaagataaagatgcagatttaattttaggcggaaacgttgcaattgatggtgcatctggacaagtaggaccacgcgtagctgaagcgttaaatattccgtatgtaacgacaattacaaaacttgaaattgacggtacaaatgtgaagattgagcgtgatgttgaaggtgatacagaagtgattgcaacttcattaccagttttagtaacagcacagcaaggtttaaatgaaccgcgttacccatcgcttccaggtattatgaaagcgaagaaaaagccgctagaagaattagaattagatgatttagatttagaagaagatgatgtggaagcaaagacaaaaacaattgaaatctatttgcctcctaagaaagatgcaggaaaagtgttacaaggcgagctgcaagatcaagtaaaagaacttgtatcgttgctccatacagaagcgaaagtaatctaataaaatacgaaattatatatgcaggagggaaaatctatggctcgtaaagtattagtaatgggtgaagttcgtgatggatcgctacgtaacgtttcttttgaagcggtagcagcagcaaaaacaattgcagaaggcggtgaagtagtaggtcttctaattggagacagcgttgcctcttttgcaaatgaattgattcattacggtgcagatcgcgttgtgacagttgaaaatgataaattaaaatcatatacatctgatggttatgcacaagcgtttttagctgtacatgctgaagaaaatccagaaggtattgtcttgggacatacagcacttggcaaagatttatcaccaaaattagcagcgaagcttgaagctggtttaatttctgacgtaactgctttagaggttgaaggtggaaatgttatcttcactcgtccaatttactctggtaaagcattcgagaagaagattgtaacagacggcatcttatttgcgacagtgcgtccaaataacattgcaactctggaaaaagatgagtctcgcagcggtgacgtatcttctattacagttgatgtgaaagatttacgtacaatcattcaagatgttgtccgtaaaacggcagaaggtgtggatctttctgaagcgaaagttattatcgctggtggacgcggtgtgaagagtgaagaaggttttaaaccattaaaagagttggctgacgtactaggcggcgctgttggggcatctcgtggtgcttgtgacgctgaatactgtgattactcattacaaattggtcaaactggtaaagttgttaccccagacttatacattgcatgtggtatttctggtgcgattcagcatttagcaggtatgtctaactcaaaaataatcgttgcgattaataaagatccagaagcaagtatctttaaagtagctgactacggtattgtcggtgacttattcgaagttgtacctcttttaacagaagagtttaaaaagttaaaagtacattcatgattttagtacccttgagttccaagtgaagtacccctatatatagaaaaaggtgagagatcccctgtctctcatctttttagtatttaatccgtatttttatatagtataaaggaacatttttttgttacaatacataacgatacatattattcgccacgtatataagttaatgatatactcttggtagaatatacttgaaggaggaaataaaatggcaattgtaaacgcaaatgaccaaagcttcgcagctgaaactagcgaaggtgttgtattattagatttctgggcaccttggtgtggaccttgtaaaatgatcgctcctgtattagaggaaatcgatgcagaactaggcgaaaaagtaaaagtagtaaaagtagacgttgatgaaaaccaagaaactgctcgtcaattcgaagtaatgagcattccagctcttttcgtattaaaagacggtaaagtagttgatcaagcgttaggttacaaaccgaaagaagcgttagtagaattagtttctaaacacttctaaaataaaaaaagctaccatttggtagctttttttattttcttttttacagtctttccgttacaataaaagaacgtatgttgggtgtttgggcatagtatgttttcaagggaaaataaaaatgctaagtatgtagaaatggagggagacgagtgcacgaacatttgaaagagaagttggctattttaccagatcaacctggttgttatttgatgaaagataagcaaggaacggttatatatgtcggaaaggcaaaagtgcttaaaaatcgtgtgcgctcgtactttactggttcacatgatgggaaaacactgcggcttgtaggagaaattgttgattttgaatatattgtaacttcttcgaatttagaagcacttattttagagttaaatctaattaaaaaatatgatccgaaatataatattcaattaaaagatgataaaacatatccttttattaaaattacagcggagaagcaacctcgcttactcattactcgaaacgtaaaaaaagataaagggaaatattttggtccttatccaaatgcacaatctgctcatgaaacgaaaaaactgctagatcgtatgtatccacttcggaaatgcacgaatatgccagataaagtttgtttgtattatcatatgggtcaatgtttagcgccttgtgtgaaagaagtgacggaagaacaaaataaagaaattgtagatgaaattattaagtttttaaatggtggacataaagaagttcgttcagaactagaaataaaaatgtatgaggcctcagagaaactagagtttgaacgtgcaaaagagttgcgtgatcaaattgctcatattgatgcgattatggaaaagcaaaagatgattatgagtgacttagtggatcgtgatgtgtttggatatgcagtggataaaggatggatgtgtgttcaagttttcttcgttcgaaaaggaaagctaattgaacgtgatgtttctatgtttccaatttacgatgaaccagaagagggttttttaacgtttatcggccaattttatgaaaacagtagtcattttaagccgaaggaaattgtcgttccaggaagtatagactcggaattagtagagcgctttttagaagtggaagcgacgcagccgaaacgtggtaagaaaaaagaccttgtagaattggcaaataaaaatgcgaagattgctcttgaagagaagttttacttaattgaacgtgatgaagaacgaacgattaaagcggtagatcatttagggaagcagcttgggattgaaacgccatatcgtattgaagcgtttgataactcaaatattcaaggaacaaatcccgtttctgcaatgattgcttttatcgatgggaaaccggcgaagaaagagtatcgaaaatataaaattaaaacggttcaaggaccagatgattatgagtctatgagagaagttgtgaggcgccgttatacaagggcgcttaaagaaaattcacctttacctgatttgattattattgatggaggaaaaggccatctagcggctgcaagtgatattttagagaatgagctcggattatatattccgatggcaggtcttgtaaaagatgataaacataaaacctcccatttaattattggggatccaccggaacctgtgatgcttgagagaaatagccaagaattttatttattgcagcgtattcaagatgaggtgcatcgatttgcgattacattccatcgtcaattacacgggaaatctgttattcaatcagcattggatgatattccaggaatcggtgataaacggaaaaaggtattgttaaaacattttggttcattaaagaagatgaaagaagcttctatagaggaatttgtcgaagcgggtatgccgaaaaatgtcgcggagacgatttatacgtatttaacagataagaagacgttgtagtttacaacgtcttctgttttttggtataatttctgaagatttaaaataaatgcatctgaatgaaaatacaaaaaagtcaactaaactgatatgtctagttgactgtaggtaatgcttacacttcaatgagatcttttatatcccattttacaagaaatgtaatagagtcagaacgttttttcttttcttcgtatgactctgcaacgacgttccgttgcttttggatttgttcagcgatgaatccggcttctagttgataagaagaatgtcgtttttgtttttgacgttctgcgatgagtgtgcctttaagttggaactgcatttcacgacgcttatgttcaacaatgcttaaagtgccccagccagccttttcaaagaactgaatgacttcttcaattgtttctagcggatattttcttgcaaggtttctaccagaccagtataaaataccatctaaatcgttgccgattaaatcaggtagtaattcttcacgtagcaattcataagcgaaggcgttcaatgaaacatcttctaaagatgttgtatcgattgtatttttactcacaatattcccctctttctatagggagtattatataacatttcacatttataaaaacagatttttctttaggaaaatctgaatatataagaagaaaaaaagaattggcaaattatatgcaaattatgtatacgttttcttgacgcttcgacaaaaataggagtaaaatgaacttggtatcaaattatgctgaaatatttcgaataattttttcagtttttcttatgccaatagtgaaaaaacattattgtcataaactaatctgaaaacagcagtcaaacattcaaggggggtaatggggacatgaaaggccgcgagtatacgtttcgtaagtggcactcattaatgggggtcatcccggttggtgtctttttgacgcaacatttaattgtaaacaactttgcaacacgaggagcagaggcttttaacaaagctgcaggctttatggagctccttccattccggtatgcgctagaaattttcatcatctttttaccgatactgtaccatgctatatatggcttatatattgcatttacagctaagaacaatgcggtttcttacggttatttccgtaactggatgttcgttttccaaagaatttcaggtatcgttacgctgatcttcatttcttggcacgtctgggaaactcgtattcaagcaatgttaggtaaagaggtaaactatgatatgatggcagatattttaaacaatccagctatgtttgcattctacttagttggtgttgtttcaacaattttccactttgcaaatggactatggacattctgcatcagctggggaattacagtatctccacgttcacaaagaatctctacttatgtaacattagctattttcttaggtttatcttatgtaggtgtgagtgcattattagcgttcatcgatccacagctagcaaaccagtaaggagtgggagagcatgaaagggaaacttatagtagtcggcggtggcttggctggcttaatggcaacgattaaagcggcagaagcaggagtaaatgttgaactgttttctttagtaccagtaaaacgttcacattctgtatgtgctcagggcggaattaacggtgccgtaaatacgaaaggtgaaggggattctccatggatccactttgacgatacaatttatggtggggacttcttagcgaaccaaccaccagttaaagcaatgtgtgaagcagcacctggtatcattcatttaatggaccgtatgggtgttatgttcaaccgtacggaagaaggacttcttgatttccgtcgatttggtggaacgcaacatcaccgtacagcatttgctggtgcaacaactggacagcaattactttacgcattagatgagcaagtacgtcgtcacgaagtagcaggacttgtaacgaaatatgaaggttgggatttcttacgagctgttgttgatgatgaaggtgtgtgccgaggaatcgttgcacaagacttacaaactatggagattagaagtttcggagcagatgccgtgattatggcaacagggggccctggtatcattttcggaaaatcaacaaactccattatcaatacaggtacagcagcttctgctgtatatcaacaaggcgcatattatgcaaacggtgagttcattcaaattcacccaacggcaattcctggagacgataaattacgtcttatgagtgaatctgcacgtggtgaaggtggacgtgtttggacatataaagatggtaaaccatggtacttcttagaagaaaaatatccggcttacggaaaccttgtacctcgtgacatcgcaacgcgtgaaatctttgatgtttgcgtagagcaaaaactaggtattaacggtgaaaacatggtgtacttagatctttctcataaagatccaaaagaactagatattaaactaggtggaattattgaaatctatgagaaatttacaggggatgatcctcgtaaactaccgatgaaaatcttcccagctgttcactattcaatgggcggactatgggttgattataaacagatgacaaatattccaggtttatttgcagcaggtgagtgtgattattctatgcacggtggtaaccgtcttggtgcaaactcactattatcagcaatttatggtggtatggtagcaggaccaaacgcaattgagtatatgaaaggtctttctaaatcatctgatgctgtttcatctactgtatatgagcaaaatgaattaatcgaaacagagaaatttaacaatattttaacgatggatggtaacgaaaatgcgtatgttcttcataaagagcttggagaatggatgacagataacgttacagtagttcgtgaaaataaaaaattattagaaacagatgcgaaaattgaagaattaatggctcgttacaaacgtattaacattaacgatacagcaagatggagtaaccaaggtgcttcatttacacgccaacttgcaaatatgtttgagttagcacgtgttattacaattggcgcatataaccgtaatgagagccgtggggcgcattacaaacctgaattcccaaatcgtgatgatgcaaacttcttaaaaactacgatggcaaaatttgagggagaaggaaatgcaccagcattccattacgaggacgttgatatttcgttaattaaaccacgtaaacgtgattattcttcaaaacacgatgtagctgctaagggtgaagagaagggggataaacaacatgtctgagaaaacaatccgcttcatcattacgagacaagacgggccagatgcgcaagcgtttgaccaagagtttgaaattccatatcgtccgaatatgaatattatctcagcacttatggaaatccgtcgtaatcctgttgattcaaaagggaaccaaacaactccgattgcatgggatatgaactgcttagaggaagtatgtggtgcatgttcgatggtgattaacggaaaaccacgtcaatcatgtacggcacttatcgatcaattagagcaaccaattcgcttaaaaccgatgaagacattcccggttgtacgtgacttgcaagttgatcgtagtcgcatgtttaatgctctaaaacgcgttaaagcgtggattccaattgatggtacgtatgacctaggtccaggaccaagaatgcctgagaaaaagcgtcaatgggcttatgagctttcaaaatgcatgacatgtggtgtttgcttagaatcatgtccaaacgtaaacagtaagtctgactttattggaccagcaccgttatcacaagctcgcttattcaactcacatccaacgggtgaaatgcataaagcagatcgcttacgtgcaattatgggagatggaggactagcaaactgtggtaactctcaaaactgtgtgcaatcatgtccgaagggtattcctttaacaacttcaattgcggcattaaaccgtgatacaacaattcaatcgttcaaagatttctttggtagcgataataactattaataaatattgcctcttcatatcgaagaggcaatatttataactttatttttctgtttattctgtttatttaaaggtgaaaaggggagataacaatgaagaggatttcttatattgaagactttgagcaatgggaaagtggtttttcgttttacaaccctgtaaaggttcgttttggtgaagtagatatgtttggacatgtaaataatgtcgttgcttttacttattttgaagaagctcgtattgcgttgtttaaagaacttggatttatgcaagagtggacacatgcatcatcagaaacgatgatcgttgttgcggatttacaatgtaattttattaagcaaatatattttgatgaacagctgaaggtgtatgtaaaggcaggatcggtcgggaattcttctttagatttacattatatggtgaagaatgcagcaggagaggtttgtttagtaggtcgtggaatgatggttcaagcgtcgaaaaaaacaggaagaggcgaaccatggcctgaagaatggaagaagaaattactacaataatagagtgaaagaaaaataagagagcaatttgctctcttattttttgtcttccatcgcttcttctaatgttaagtgatgtttatataggtatgtagcgtatggattaccaacgtagcgtaagtgccatggttcatatgcatattctgttgtatctgttttatcttctaagtaacgaatgacaaagccgaattcatgagcgtgttctgcgacccattttccttctgctgtctccccgaagataggctctaattgaaatttagctgattttgaactaatatccattgctaaacccgtttggtgttcacttgtaccaggaattgcgcttaccgaattagcttcggcttttccctggcgtctaacgtatgtatcatgcaacgatttttggcgtttgtatgaacgataaccagatacagctgtaagatcaagcccttcttttttcgcagctttaaacatgttttcaagtgcctctgcagcatcttttcgcagcaatgttttttctttatcttttggactaataaatggtacatttggtctcgttaagtcttcaggaatgtatccatctggtagttttcgatgtttattaattaagacaagattagatttgggatttgttaccactgaaaagtcattgtctattttctttgcattatgatcagcttttggaaaagcaggaatctcttcttttttatggttattatgcttttgactttcgacagcttttgcttcattatgtagtggtgttttagaaccaaagtaagcgaaagatgtgatcccgattacaatagtagtggcagaaataattattatctttttcatgatgccttgtaatcacagtcccttcttaataaaatgtgtaatgtttttttattataaatctagtttgttggaaaaggaatataagagtcataacgtaatagaaatgcaaagaaaatgtcagaaaatgtgtgaatttgtagtatttttttatataattcatttcttatctttcatgaaatgcattttttatgtaatatatatacataagaagatgtagcgattatcgagaatagagaacttcttgtatagactgggagtgaatgggaatggattttgcaacaattattggacttattttaggatttgtagcagtggtagtagggatggtcgtcaagggcgctgacataacagccttattaaatcctgccgcagcattaattatttttatcggtacatttgctgcagtatgtattgcatttccgatgaatcaactaaaaagggttccaaaactatttaaagttctttttggttcaaataaaaaggatttaagttatgaacagttgctagaattatttgttcattggacatctgaaagtagaaaatacggtattttgtctttagagcaacaattagacaaaattcaagatgaatttcttttgcgcggtatgaaatttgtgattgatggcgtatccgcagaagatttggagcagattttggaatctgaattagaggcaattgaagaaagacatgcaaagggagctgctattttttcacaagctggtacgtatgcaccgacattaggagttttaggtgctgttatcggtcttgtagctgcgcttggtaacttaactgatattgaaaagttaggtcatgctatttcgggtgcgtttattgcaacgatttttggtattttttcaggttatgtattatggcatccatttgcaaataagttaaagcaaaaatcttcagctgaaattgagaaaaaacgtttaatcattgattgtttattaatgttacaagaaggtacatatccgtttattatgaagaaccgcattttaggtgcactttctgcaactgagcgtaaaaagctagaaaaaggagcagaaaaaaatgcggagtaagaaaaatagaagaggcaaaaagaaaaaacatgatgagcatatcgatgaaacgtggttaatcccatattctgatatgttaacgttgttatttgcattgtttatcgttttattcgcaatgagtagtatagatgctgcgaagtttaaacagatggcagttgcttttcgaagtgaattagctgggggaacaggtaacaaagaatttttaagtgatcaaaagccaaatgatgaaaaagaattatcagcaagtagccttgaggcagaacaagcaaaaaaacaagaagaagctagagctaaagaaaaaaaagagatggatgaattgaaagcattacaaaaaaagattgatcaatatattaatgaaaaacaattatcctcttcttttcaaactaaattaactgaaaagggattaatggtgacaatattagaaaatatactgtttgattcggggaaagcagatgtgaaattagaatctttagggattgcaaaagagatgtctagcttacttgtttcagcgtcacctcgtgaaattacagtatcgggtcatacggataatgtccctattgccaatgcgcagtttgcgtcgaattgggaattaagtacgcagcgggcagttaattttatgcaagtattactgcaaaataaagaattacaaccagaaaaatttagtgcgattggatacggagaataccgttcaattgctccaaacgatacacaagaaggaaaggcaaagaatagacgtgtggaagtatttatcttgcctttaacagagaaagtaaaataaaagaggatggcgaatgccatcctcttttattttacttcaaatgattttaagttgtcgcgacggattttatctttttctgcatctgattttttgaaatcataatcatataaagcgccttcccaatcgccatacattggattcgggaaaataatgaatttctcaccaaattgtgcttttgaatctgctactgtttggttacgatcttttacagattttccatcaaaacctgtgaaatcagataagttatcaccgaagaataagacaatatcatgagtttgagaaacgagttcacggcgtttttcttttcctttttctttcggatcttgtagtaatatatgttctttcgttgcttgaggagcacctacacgctcaagatttttaattgtcgcatctagttgattcgttttacgatttgagatgtagtaaatatctacacctttagactctgtatattttaagaaatcaattgcgcctggaagggcttcagcctcagctttgttaatccaatcatcccatttgtaaggatagcctttgcctgtttttacgctcattgcttgatgaggactgttatctaaaacagtttcgtctaaatcaagcacgatagcaggttttttctctgtcccttttgcaagaattgtatcaagctttaattgaccaatgttgtacccttggtagtaaagtgctttcgtttcaccggctgtttgataccataaatcagccattaattgttgttctgttaattttactttctcttcttttgccactgttttctctggtgttcctgaacatgctacaagtgatgtagatagaaccgctacagataataaagtggtaatgcccctcttcatcttcatatgtatcctccttgatgttagaaaatcattttatattatatattaaaatataatatttttatatgaacatttgcatattgtcttttgtatatatagtagtatgtcctatattagaaagatgagcaaaataataatagttgttttgacaatttttattgtcgtaatgacaattataattgacaaaaagaactttgttatttacaattttaactaaatagaacaaatgatggattaatgacgatgtttacatataagaggatgaagcgcggtgctatattttgtcttgaataaacatagtctttgaaagagagtacgaatgatactaaaggggaggctttatacttgagtttacaaattcaaaacttaacgaaacaatttggggaatcaaaagcagttaacggtttgcaaatttcgttaccaaaaggtgaagtactagggttacttggacgaaatggtgcagggaaaacaacaacaatcaaaatgcttctcggattattaacgcctaatgaaggttcgattacatgggatggaaaagcatttggaaatagtggtgtaacaattgggtatttaccagaagaaagaggtttatatacaaaaagtagagtaatagatcagctgcgatattttggtagattagaaggaatgtcgaagaaagaagtggatcacgctattgatcactggttagagcgtttagcgataccagaatataaatttaaaacggctggagagctttcaaaagggaatcagcaaaaaatccaattaattgctgctcttcttcataatccggaacttctcattttagatgaaccattcagcggccttgatccagttaatgctgggatgttagctagtattattgaagaacaagtacagagcggaaagacgattattttatcaagtcatcgtatggaacaagtagaggctttttgccaacatgtatgtattttgaaaaaaggtgaagcagtcgtaaaaggacagctaagtgatattaagaaagaatacggtttccgtaatttaacgattgaagatacagtagagaatgaaaagggattagaagctatacatgtatcgtatgaaaaacaacaaggccttctttatgtgaaagtacaagacgatgcggaagctctcaagattttgcaacagttgcaagagcaaggtgttagcttacgacaattcaaaatgttagagccgacgttaaacgaaatctttgtagagagggcgaaataacgatgcgtaaattttctcacgtattttcattttattttagggaagcatttttatctaaaaaatcattaattacgagtgcgattttatttttagttgtgtttgggatttttgcatttaatcattttacttcaggcgatgataaaaataaggataaagataaaattgcagttgtagtagagagttccacatataaagtacaaaaagatgagctaaataagctattgccatcagcaaaaataacaattggttcaaaggatgattttgataaactgcataagcaagtagaagaaggcgatttagatggtctattccatgtgacggaaaaggatggggctccatcgattacatatatgtataatggatttccaagccaagcaacttctgcaattatggcaggatatttaaagcaacaatatacgatggtgacgattgccaaaaataatgtttcaccagaaattgcacagcaattacaaacagaaattcaagtaaagcaagaagcgataaaagatcgtacatcttctttcggaattgcctatttctttacatttgctttatatatgtttattgtagcgttcggaaatacaatcgcaatgaatattgcatctgaaaaggcgtcacgtgtaatggaagtaatgcttccgaaagtgaagcctcttacgatgatgtatgcgaaaattttagcggttgtttcaacggcgttattgcaacttgtcatattggcgtgtggttatcttattccatatttgttaggttgggtcgatttagaaagtgcctcactacttggtattccaattgactttacgaaattagatgcaaaggttatcagcatgtttcttgtttatttcattacgggatatttactttatgcgatgatgtatgctgctgctggagctgtcgtgtctaagacggaggatttacaagctgtatctttcccggtaatgattttaattatggctgcattctttattagtattaaatcattaagtgatccgaatagtactatcgtcgttgtaaattcttacgttcccttttttacaccgatggttaccttctcacgtattgtagctggtgaagcaggtatgctagaaattacgataacattagcagtcttattggcgacaattgcggtattaaatgctgttacaagccgcatttacgtaaacggcgtaatgaattactcagataaagtgaaatttaaagatttagcgaaatttataaagcgtcaataatgagagaaaagcatgatttcctattgaaatcatgctttttctttatgtataaattaaaaatagtatataatgataagagtcgtcttttaatagaatgaataaaaaggagggtgtgcagatggggattagtagtcgttttacagtaggtgttcatatgctgacattacttgcgatagatcgaaactctcgctgtacctctgaatggattgccggtagtgtgaatacaaatccagttgtgattcgtcgcattacaggaatgttgaagagagcaggacttgttgatgtacaagctggtaaaggtggtacgacacttgctcgagatttagaagaaattacattacttgatgtatataaagcagtggaagttgtagaagaaggacagctattttccttccatgaaaatcccaacattgaatgtccagtaggagctaatattcaatcagtattagaaattattttaatgcaagcgcaagaagcgatggaaaacgtacttgcaaatgtaacggtagatcaattagttacaaatttaaagtctaaaatgaaagaataaaaaaaagcgagcttcctcataatgagggctcgcctttttttattcagaaatattgaaaattctatttttcagtatttaaaatgaatttacctacgatagctgcgaagataccaccaagaattggtgctacgatgaatacccatagttgagaaagtgcttctccaccaacaaataaagctggtgcgatactacgagctgggttaacagatgttccagttaacggaattcctaataagtgaattaaaactaatgtgaaaccaattactagtccagctaaagaagaacttccttttttacctgttacagcaacgataactaaaataaatacgaaagttaaaatgaactcaactaaaaatgctccagataaaccaagagttccgaaaccattttgtcctaaattatctaaaggtgttttagcagattttaaaattgttactaacgttgcagttcctaataaaccacctaaaatttgagctaatacataataacaaagttccatagcgttcattcgtttgttgatgaacatagctactgatactgctgggttaatgtgacatccagaaattgttccgatgctatatgccatagctacaatagatagaccgaaagccatagcgattcctaatgttccaattccttcaattccgccgccagtgacggctactccagttccgaataatacaagtacaaatgtaccaataaattcagcgattgctttttttaacataatttacctcctattaatgcgcatgaaacgtattataacataagttttagtataaagagccaatgaaatactattctgataaggcgaaatagggggacaataaaaaagagtatggttcatctctatagaaccatactctttttttatgctgattttttctgtttaacgactggaacagaacggtttaaaatactatttgcaaccattcctaacatgataataatcattccgatgagagaaagtcctccagggagtgaaccatttaagaaaatgatttcaccaagcacggtaaagaccatcgttccagcttgtgttgcttcaacagctccaagtagagagaggttatcttttgctaagtcagtagcaaagaaaaatgtcatcgttgcaataacaccggaacataatgctaacagaaatccttgaagcatttggttggatgttggaatgccagtagtagaaaatccgtatataccaagcaagattgttataggaagacttccaattgccattcctaatacacgttggaacgtatcaaggcgtccaccaacaagctccatcatttttcggttaccgaacggatataagaaagcggctaatacgacaggtaaaaaacctgaaatgaactgagtcattgtaatatggcctgcggcagttgtttgcatacaaattacaccaagtaaaataaataatgcaacatataagctacgaagtggaatttttccacgtacaagtttcgtacctgattttgtttctattttcacgaaaaatagtggtgatagtagtaaaccagctaaaatcgtaacttgccaagttccagcaacgagccaagctggagaaaagacagctgcgaaacttaataaagaataaaaaccaataccggcaacagaaccccatccgatccatgccaatggatgtttttttaactcttcccataatcccctaaagtttttgcgaaataaaacgataaggaataaaataggaagagcaaataaaaaacggaaggaagctgtccaagcccagctcgttccagatacattcattgctctattaataataaaggttgcagaaaaaaaggccgatgataaaagacctaataaaattgcgcgcatgaagtataacactcctttcgaaaataaataattatgtatagtatgatatacttttaattattaaaagtaaactattttatactttaaggtggttttatatatgaaagaaaatgaagatatgcaaacgaaagaagtcattcaacaagttggacagttattgagacaaattcgaaatgaacagaaattaagtttagaagaattagctcataaaacaggagttagtaaattaacattaggaaagatcgaaagaggggaaacaaatccgacactagctgtcatttggaaaataacgaaagggttatcaattcctttatccagattaatggttgttggagaacctgtagctgttgcgcgctgtggagaaggatttgcagtagatgaaggacaagcgtggcatttagaaacgatgttccgttatacgaaagaaacagggatggaaatgcaccgtgcttgtttacgatcaaatagtatatatgagccagaagctcatcatgaaggtgcgattgagcttgtaacggtaatgaaagggaaagtgtctattcaagtggagaatgatgtatacgaattaaatgagtttgattccattcaatttgaagcgaataagaagcatatttataaaaatgaagaagaagaagtagcggtattacatttaacgatgaaatattcttcatgaaaaaatcacctataggattctataggtgatttgctcttcttaagtatgtgaaataatgccgttagtacgaacgtggcataagtaataaacaaatgaaataaactaaaaatcctgtcccaaaacataaaacagcaataacccaaatgatacgaataagagtagagctaatatcaaaatattctcctaaaccaccacatataccaaatagcattttatcagtttcggatttacataacttttttgacatattccaatcaactcctttttatatcaaactgcatacttttattctatatggaaatttatgagaagactatggggttgtattacatttttttgtgagaagtgatcgtattaattgtcttaattttcagtggatattaaaattgtagttatgaggtgatttttaataaagggtggggaaatagagatgacagtatattggttggctaacgtaatgcttgaatcaggatatacatatgaagaagagagaatttcaaaaacagaaacagaattatgcagtttacttattgaagatggtcgaattaaaaaaattataaaagggattgttcaagaggaagatatagtaacttttgatgctaagaacttattaatgttgccagctttcaaagagatgcacattcacattgataaaacatattatagtggcccatggaaagcttgtatgccagcagaaagtatttttacacgttttaatgaagaagaaaaaattttaccaaagcaattagcgactgcccgaaatagagcggaaaatatgctagagttactactgcaaaatggtgcaacgaatattagaacgcattgtaatgtcgatccgattattgggcttggtaatctggaggcgacgttagcggcattagaaacatataaaaatcgagtgtctagtagaattgttgcgtttccgcaacatggattattgcgcagtgattctgtgcaactcgtgaaagatgcgatgcgtatgggtgctcatctagtcggaggagtagatccagctacagtagataatgacattgaaaagtcattacatacaattatggatatcgcagtagaatttaatgcggatgttgatattcatttgcacgatgcgaataatcttggaacgtttacgatgaagagattggcaagtttaacagaagaagcaggatggcaaggccgtgtaacgattagtcatgcacttggacttggtggtgttactggtaaagaggctgaagaagtggcagaaagactcgcaaatgtaaatattgatattacttcaacagtgccaattggtaaacaagtaatcccaattccgttattagataaaaaaggtgttaaggttgcattaggcaatgatagcattacagatcattggtcaccgtttggaacaggtgatatgcttcaaaaggcgaatcgattagcagagcgttttgggtggagtgacgaaaggtctttaggaaaagcactccgctttattacagggggaaaagaaacgttaaataatgaagggaagcgagtatggccgaatgtaggggatgaagcgagctttgttttgacgaatgcgacatgcgctgctgaagcagtagcgcgtcaaacagaaaaacgtttagtcgtgtataaaggaaatattgttgttggaagtttaaatgaggtggaattaaataatcttgtgtagaagaatcgtttaaatattttgaggagggttctaatggtgagtatagaactcttcttttttattcttacaatatatttttataggaaagctagaagggatgaaaaaattggacaatcaacataaccaaaatcatattatgggaactttgcaatggtttatatttttattagcaaattcaatagcactaccaattgtcgttggcggattatttcatcttacgacggaagaaatattttatttaatgcagcgtacgttttttgtagttggtatatcttcttttttacaagggtggcttgggcatagactgccaattgcggatgggctggctggatcttgggttggtgtatttaccgtacttgcttatgcaacggccggacaggatcaattacatagtacactgcaaattttagaattaggaatgataatctccggtgttattttaataggattaggagtaactggttttataggacgtattttatttttatttacgccgcttgtgacagggacgtttttacttttattatgtttacaattaagtggtgtatttttaaaaggaatgttaggaattacagctactatttctcaaatcgacggatttacagcaatgatcgcgtttagtatatttctgttcgttattatactatctaattttggaaaaggctttgtcaaaagttatgcagttttaataggattaattagtgggtggattatttttctcattgcaggaaaagtgacaatcccatctcaagtaactcattttgtgcaacttccacatatatttgcttggggacttccaaaatggaatacaggtatggctgtatcaagtttcgttatggtatgtattttagtttcgaatacggtggcagctattatagcaattaatcaagcaactattcataaagcgactattgaacaaaaacagttgaaagatggaacatgggttggggggatttcgcatctcatctcttctgtattttcaactgtaggtgtcgttccgttaccagcaacggcaggattcatacgtttaacaaaacaaaagtatatacgatcgttcttaatggcatgtgcgttactagtcgtaatgtctctttttccaagtattattcgttacttagcatctttaccatcagctgtcgcatcggctgttttaatggcttcgttcgtacagttaattggaattggatttaataatataaaacaagtgccgatgagtgaaaggaatgtaacgatcttaggcgttgcagtattatttggcagcggcgttatgtttttaccgtctggagcactccaatccttgccgtctgttatgcaatatatattcggtaatggtttatttgtaggtacggttgtaagtatattgctagaacaaatatggcgcgttggaaagtaagtggataaaaagagtgtacgcactgtataaaagtctaaaataacataggaaataaagcccattttcattcaccacctgcacatttcgttcatacaatatcttgactaaataaacacccaacttacacatacacagctctggcttaagcaaggagggttataccagttgaaggaaaaagcgtatcaatctaaacctttactcacaaagagagagagagaagtatttgaattgctggttcaagataaaacaacgaaggaaattgcaggtgaactttttataagtgaaaagacagttcgcaaccatatctcaaacgcaatgcaaaagctaggggttaaaggacgttcacaagcagttgtggagcttcttcgtatgggagagctcgaattataagaaagcagccgacttttatataaaagtcggctattttttgtttgcttcacttgctatatgaatgataagaacactccatacataaataggtaataagacctgcggtagtatgtcaactgaaaaacaaaagaatttttagttatcaaaggtgctttaagacactggggaatgtcttataaattagggaggaacaacttcaatacatatactataaaaggtaggtgtgactctcatgtgaacatagggtgaaagagagagggagttttaaataaaagatagaaagacaaaaaaataagaccatcatttataagatggtcaaggaaggggacaatttatgtcaatttaattagggatggaagctgttcaaagacactggggaatgtcttataaattagggaggaacaacttcgatacatatactataaaaggtagatgtgacctctgtgtgaacatagagtgaaagagagtggaagttttaaataaaagatagaaagacaaaaaataagaccatcatttataagatggtcaaggaaggggacaatttatgtcaatttaattagggatggaagctgctttaagacactggggaatgtcttataaattagggaggaacaacttcaatacatatactataaaagatagatgtgacctctgtgtgaatatagagtgaaagagagagggagttttaaataaaatgaaaatttaatgagtgttttttgttcatcccctgttgattattagccttaaccaatcgggcgtttattgcccacaaatagcggaataaaagataaagcaaacaaaaaataagaccatcatttataagatggtcaagggaaggggacaatttatgtcaatttaattagggatggaagctattcaaagacactggggaatgtcttataaattagggaggaacagcttcgatacatatactataaaaggtggatgtgacctctatgtgaacatagagtgaaagatatggggatttgaacaatagtacatatgaaattgttattgctagcaatatagaattaggatatagagttttccaacataaaacgaaaaggaatctgaatataaataaaagttgtaatctatgaaaaaaaagattatgctcaactatattatgagaatataaggtttgtcccaattatttaagggcttttaaaaagctttttattgtatgaggggaagcttcactttaataagggagttaatgatatggacgtaacaaaaaaacaagggctgtataatcgtcttatacgattaaacccaccacaaatattagcattaggctttttctgcttaattgtggttggcggtttgttattaaaattaccattcgcaacgaaagcacatattagttgggtagatgctttctttacagcaacgtcagcagcgaccgtaactggtttgggagtagtggatacagcaagtacatttacgatgtttggcgaaattgttattatgtttttaattcaaacaggtggtctaggtcttatgacaattgccattttaattgtttgggtactaggtaaaaaaatcggattacgccatcgtttattaattggagaagcatttaatcaaacaaatataggtggtcttgtaaaattagtaaagcgtgtctttatattttcgatttgtattgaacttattggggtcatctttttatcgtttcgctttattccagagtttggttttggaaaaggtttatactatagtatttttcatgtaattgcatcttataataatgcaggatttgctttatggccagataatttaacaagatatgtaggggatcccattattaatattgggatttgctctttaattgtaatcggaggactcggttttaccgtattaattgatatatggtatagtcgcagttttcgaaaattatcacttcactcaaaaataatgattattggaacagtagtgctaaatgttatagcaatgattgtgatttttgtattggaatataataatgtgaagacgttagggaatttatctttaaatgaaaaactatgggcttccttctttcaaggtattactccgcggacagctggatttaatacggttgactatggaggtatggaagaatcatctatattatttacgatgattttaatgtttattggtgcaggaagtgtatcgacaggtggaggaattaaattaacgacgtttgttatcttaattacatctgtcctttctttctttagaaaaaaggaggaaattgttttatttcagcgtacaattaaaatgtcgacagtaacgagggcattagcaattgctgttgccagtcaaatacttattttagcagcggtattcatattaatgcttacagaaaacttcagctttattcaattattatttgagacaatatcagcgtttggcacagtcggattaacgatgggaattactgcacagctatcggcattcggaaaatgtattattatgtttgttatgttctgcggattaattggaccattaacacttgtgttctctttagcgcgaccagcaaaacaaaaaataaaatatccatcggaagatgtgtttacaggataaggtatcccgcgttaagcgagatacctttttcttttttagaacagggagaacaatagaccaataagtgctactcggaataaaattgcgataagtgcagcaattccaccgacaactgcagcgataccgccagttacagtagctccgcgattataagcgtaaataccgagtaaaacagaaacaagaccaaatagtgttggaaatgtaaatagcgataagatagatagcgcaagagcgataaaaccagcagttgatccagcagcggacgattttacaacatctttatcgtctttatcatcgtaatcataatcaatgcgttgtggtgcgacctcagcggcgtactcttctttatagtcactataatcactatctattctatctctttttttataatcatcaaatttctcagtcaaagtcatgactcctttcataacaaggttcaatagtagtatgtatctctttttcttttttatcccgctatttgtgggagtcgagctacgtacacatcccactgattaaagtttcactataccggagcatgtacagggagtagtatcttttaaaagaaggaaaatgtttttttaaaataggaaaagttagtatgacttcctctattttggaaaatataaaaaggaataatgaggaaagggtgcaatacataatggaacatccaattgaaaatttaatgaaaacggcaatgacaaatttaaaagagatggtagatgtaaatacaattgttgggagcccggtttcaacagctgacggaaatgtagtattaacagtatctcaagtggcttttggttttggagctggtggaagtgattttaaaggggatttcatcactgaaaaacataacggtgggcaaaatcagcataaagagaacaaacaagggcatccatttggaggaggaagcggggctggggtttccattagtccagtagcttttttagtagttggttctaatggggtgcaagtattacatctcaacagcagtacacatttaattgaaaaggccttaaatactgtaccaagcactgtagataaatttgtgaatggtcgtcaaaagtgaacttgcattttttaggaattatgatatattagaaaaagtgcgctttaggatgatcggaataattgaaatgtaaatatatatgatgtgtggaataagggagaggaatttatgattaatatcaaaaacttagtagttggcttatttatgttagtaagcggctttgttgtatatgtaataaaagaaaaagctccattttaaaacagacaaaccgttaatgtctgtttttaatttgcggaaaaaagttgacaagttattgtattggtgttaagattttaattcgtgtctcggttacagctagtgtaaagtaaatatctcttatgaatgcaatacgaaaagtttgcgaaagatcgggtaattttatcaacaacttttgtgaacaaaccctataaattgtatttgtaagctatatatgtatactagtgaatcaaggagcggtcagtggaaccgtaatgatgagagagaggtagggctttcatccagtatatgttactttcccgttaggtgaatataaaaaagaggactccttttaaaaggggtcctcttgcattttttaagtgcgactttcaacttgttgacaaatttcatccgttgttaaaccgtgagctgtaatgactgatcctttaattgatgtatctgcaatgcccatcacattagaatcttgcccagttacaacgcaacaatcacacccttgtgcatcctgttctgagttaagtgtaacaacttcatgaccttgttgttgaagagcttgttgaacgtctgttaatgagttttcaacgccaattctagccataattatcacctcctaccatctaattgctagtatgctcaagttcactgcatatatttatgaaaagacggtaggaagtaaatctttgtttagtcgttatatacgccagtaagcatttgactaacgaattgatcgtttaatgtatcttgtgctgaagaagtatttgaatggatgtcgattgaagcaataaaatgattatgttctttcgtatttggttctacctctacgtaattatcgaatttacaaaaacctttcgtatccattagatcaaataattgcagcatttctactacctcttgtctcgttcctttaatttgtacacacgccatatttatttcctcctttattttgacaaattgttttttaaaaataggattatgattacgaaatgaaaaatatgaatgttatttttagacagcgctatttttgttattttccccctttttcagcaaaagtcgttatatatccccggatttataaaatcggacgtccgtttattgaatacaatagattcgtatcaattgatgaaaatccttcttttaaacaaatatttttttagtggaagttggcgaaaaaaattttttgactttttgtaaacgttaacaatgttgttaaatcagtataagcaaagaagtacgtatgattaaaaattataaattttctaaaaaattcacttgatttatttagaaaggagagtaaactaggaaacaataaaaaattcatagaacataggaggcgcttctagtgaatgagcaatggattttcttaaatggagaatttgttccaaaagatgaggcaaaagtttcagtatatgatcatggctatttatatggcgatggagtgtttgaaggaattagagtttatagcggtaatgttttccgtttgagagagcatcttgtccggctgtatgaatcagcaaaatcaatccttttagaaattccatattcattagatgaagtaacaaatattgttgttgagacgattcgacaaaataaattatctaatggatacattcgccttgttgtatcaagaggagcaggaaatcttggattggatcccgattcatgtaagaagccgaatgtagtagtaattgcagaacaattatctttattcccacaagaatattatgagaaagggattccagttgtaacagttgcaacgcgccgaaatcgtcccgatgttttatcccctcaagtaaaatctttaaattacttaaacaatattttagttcgtattgaagcgaaattagctggagtacaagaagcacttatgttaaatgatcaaggatatgtagctgaaggatcaggagataacgtgtttattgttaaaggaaataaattaattacaccaccaagttctgctggagcgttagaaggtattacacgaaacgccattttagaaatcggcgaaaaacttgggtatgacgtaagagaagagttatttacaagacatgatgtatatgtagctgatgaagtgtttttaacaggaacagctgctgaagtgattgctgttacgacagtagatggtagaacgattggcttagggcaaacaggtccacatacgaaccgtttattaaaagagtttcgtaagttagttgtagaagatggagagaaaatttacgaagaaaataaagttggataacaacttttttaacataagaaagcgttgatagggaggagtagttgattgtgaagcctcacagagagtcggtggttgctgaaaaccgatggttcacgtcgacgaacatcgcccttgagtgctaagctaaagcatttgtctaggcttagacggtagctccgttattagctagatccatttatggatcactgaggcaagagtattcttgcgaagaagggtggtaccgcgaaatctttcgtcccttcagcacatagctggagtgtggacgtaggatttttttattgtataaaagtttgaaaaagggggcttataagaacaatgtcttcaaaaacggaagagaaactggcaactggtgcacagctattgttagaagcgctagaaaaggaaggcgtagaagtgattttcggttatccgggtggtgccgttttacctctctatgatgcattgtatgattgtgaaattccgcatattttaacaaggcatgagcaaggggcaattcacgctgctgaagggtatgccagaattacagggcatccaggggttgtaattgcaacgagtgggccaggtgctacaaatgtaattacgggtctagctgatgcgatgattgattcattgccacttgtagtatttacaggccaagtagcaacaacgttaattgggagcgatgcttttcaagaggcagatattatgggacttacgatgccagtgacaaaacataactatcaagtgcgaaaggcctcagatttacctcgaattattaaagaagcatttcatattgctaaaactggaagaccaggaccagtcgttattgaccttccgaaagatatggtagtcgagaaaggtgagcaatgtagcaatgtacaaatggatttaccgggatataaccctaattatgaaccgaatctacttcaaataaacaaattactcaaagtaattgaaaccgcaaaaaaaccgttaattttagctggagcgggtatattgcatgcgaaagcttcgaaagaattgacaaattttgctcgtaaatatgaaatccctgttgtgcatacattacttggtcttggtggttttccaccagatgatgaactatttctagggatgggaggaatgcatggttcttatacagcaaatatagcgttatatgaatgtgacttactcattaatataggcgcgagatttgatgatcggcttacagggaatttagcttattttgctaaaggggctactgttgcgcatatcgatatcgatccagcagaaatcgggaaaaatgtgccaactgaaattcctattgttgcaagtgctaagcgggcattggaagtattacttgaaccagaagggggaaaagaaaatcatcatgaatggatcactttattaaaggggagaaaagaacaatatccattctcttataaaagaaattctgaaagtattaagccccaatacgcaattgatatgttatatgaaattacgaagggagaagcgattgtaacaacagacgttgggcaacaccaaatgtgggcagcccaatattatccgctgaaaaatccagataaatgggtaacttctggtggattaggaacgatggggtttggatttccagcagcaatcggtgcgcaaattgcaaagcctgaagaattagttattgcaattgttggtgatgctgggtttcaaatgactctacaagaattaagtgtattaaaagaacacgctttacccgttaaagtatttattttaaataatgaagctttaggaatggtaagacagtggcaagatgaattttacaatcaaagatattcacattctttattaccatgccaaccagatttcgtcgctcttgcgaatgcatatggcataaaaggtgttcgtattgacgatccacttcttgcaaagaagcaaatccagcatgctattgaattacaagagccagtcgtaattgattgtcgtgtacttcaatcagagaaggttatgccgatggttgcgccaggaaaaggtgttcaccaaatggagggagtggaaaaagggtgaagagaattgttacagcgacagttcgaaatcaaagtggtgttttaaaccgaattacaggggttatgacacgaagacattttaatattgaaagtatttcagtaggtcatacagaatcatcagatatatcgcgaatgacgattgttgtacacgttgaaagtgaacagcaagtggagcagttaattaaacaactgcataaacaaattgacgtactgaaagtatcagatattacagaagaagcgatgattgctagagagcttgctcttattaaagtagcaacttctgtagcgagggcagaattatatagtttaattgaaccgtttcgagccgctgtaatagatgttgggaaggattccatagttgtgcaagtaacaggtacgcaagacaaagtagaagcgttaattgaattacttcgtccatacggtttgaaagaaattgctagaacaggtgtaacagcatttacacgtagtatgaaaaaacaagataagcaagttatgttaattcaataatcatttaaatatagggggaaatgaaaatggcaaaagtttattatgagaaagatgtaacagtaaatgtattaaaggaaaagaaagtagcaatcatcggatatggctcgcaaggtcatgcacatgcgcaaaatttacgtgataacggatttgatgtagtagtaggtttaagaaaaggtaagtcttggaataaagcgaatgaagatggattttctgtatatacagtagcagaagcagcggaaaaagctgatgtagtaatgattctactgcctgatgaattacaaccagaagtatatgaagctgaaattgcaccaaatttacaggctggaaactccctcgtgttcgcacatggatttaatgttcactttgatcaagtaaaaccaccagctaatgtagatgtatttctagtagcgccaaaaggaccggggcatctcgtacgccgtacgttcgccgagggcggggctgttcctgcattatttgcagtatatcaagatgcaacaggagttgcgactgaaaaagcactttcttatgctgacggaattggagcaacgagagctggtgtactagaaacgacgtttaaagaagaaacagaaacagatttatttggagagcaagctgtactctgcggcggagtgactgcacttgtaaaagcagggtttgaaacgttagttgatgcaggatatcagcctgaacttgcatattttgaatgtttacatgaactgaagctaatcgttgaccttatgtacgaaggtggacttgaaaatatgagatattcagtttcagatacagcgcagtggggagacttcgtatcaggaccacgcgttgttactgaagatacgaagaaagcgatgggggcagtattagcagaaattcaagatggtacatttgcaagaggctggattgcagagcataaagcaggaagaccaaatttccatgcgacaaatgagaaagagaataaacatgaaatcgaagtagttggacgtaaattacgtgaaatgatgcctttcgtacagccgcgagtaaaggtaggggttaaataatatgaagcaggttttgttcatggatacaacgcttcgtgatggcgaacaatcaccaggagtaaatttaaatgaacaagagaaattacaaattgctaggcaattagagaggcttggtattcatgtaatggaagctggattcgcggcagcttccgaaggtgactttcaatcggtaaaacgtattgcgaatacaattcaaaatgctacggttatgagtttagctagagcgaaagaaagtgacattcgaagagcatatgaagctgtgaaaggtgctgtatctcctcgtctacacgtatttttagctacgagtgatattcatatgaaatataaactttgtatgtcaaaagaagatgtgttaaatagtattcatcgctcggttacgcttggaaaatcattatttccgacagtacaattttctgcagaagatgcgacaagaacatcgagagcatttttagctgaagcagtagaaattgcaattcgagcaggagcgaatgtaattaatattccggatacagttggatatacgaatccagaagagtattattctctttttaaatacttacaagaatccgttccatcatatgaaaaagcgattttttcttgtcattgtcacgatgatcttggtatggcagtagcaaattcgttagctgcggttgaaggaggagcattgcaagtagaaggaacgattaatggcattggagaaagagcagggaatgcagcgttagaagaagttgcggtagctcttcatattagaaaagatttttataaagcagagccttcaatgactttaaaagaaattaaggcgacgagtatattagtaagcaggttaacgggtatggttgtaccgaaaaataaagcaatcgttggagcgaatgcatttgctcatgaatcgggcattcaccaagacggggttttaaaagaagtaacaacttatgaaattatcgaaccagcgcttataggagaatctcaaaatctctttgtacttgggaaacattctggccgtcatgcgtttacggaaaaaatgaaagagcttggttatgaatttacaaatgaagagcgagatgcggcattcgaagcatttaaaaagttggctgatcgtaaaaaggaaattactgaagaagatttacgcgcacttatgcttggtgaagcagcatttgcagctcagcaatataacattacgcaattacaagtgcatttcgtatcaaatagtacacaatgcgcaacagttgtgctgaaggatgaggaaggaaatgtatatgaagatgcagccactggttctggtagtattgaagcgatatacaatgcgattcaaagaattttaggattagaatgtgaattggcagattatcgcatacaatctattacacaaggtcaagatgcacttgctcacgttcatgttgaattaaaagaaggtagtcaccaaatatcaggtttcggagttgcgcaagacgtattggaagcgtcggcgagagcttatgtccatgcagcagggaaattaaaatctcttatagcgcttgggaaataaatatttgataggtgagagaagctttcctcacctatcaaattaaagttctgaaaattcagttaaaaggagtgttaaaaatggaaaaacgtatcgtttgtttagctggtgatggtgttggtccagaagtaatggaaagtgcgaaggaagtattgcatatggtagaaaggctatatggacatcattttcatttgcaagatgagtactttggtggtgttgctatcgatttaactgggcaaccattaccacagcgaacacttgccgcctgtttagcgagtgatgcggttttacttggagcagtaggtggaccaaggtgggatagtgcgaaagaaaggcctgagaaaggattattagcattaagaaaaggactcggtgtatttgcgaatgttcgccctgtaacggtagaaagtgcaactgcacatttatcaccattaaaaaacgctgatgaaattgatttcgttgtcgttcgtgaattaacaggtggaatttatttttcttatccgaaagagcgaacggaagaagtggcgacagatacacttacgtatcatcgccatgaaattgaacgtatcgtttcgtatgcttttcaattagcgaataagcggaagaaaaaagtaacatctattgataaagcgaatgttttagagtctagtaaattatggagaactgtgacagaagaagtagcacttcgctacccaaatgtggaagtagaacacattttagtagatgcagcagctatggaattaattcggaatccaggaagatttgacgttattgtaacggaaaatttatttggtgatattttaagtgatgaggcttcagtattagctggatcattaggaatgcttccatcagcaagtcacgctgaaaaggggccttcattatacgagcctattcacggatcagcaccggatattgcggggaaaaataaggcgaatccaattgcgatgatgcgttctgttgcaatgatgcttgggcaatcgttcggattaacgagagaaggatatgcaattgaagaagcagtttctgcagtccttaaatcaggaaaatgtacagcagatatcggggggactgaaacgacaacttcatttacaaaggcagttattcaagaaatggaagagcaagcgttagtagggagaggaagataatggggaaaaggttactagataagctttgggaaagacatgtagttgcgactaatgaaaatggattggatttattatatatcgatctacatcttgttcatgaagtaacgtcaccgcaagcctttgaaggcttgcggcttacaaatcgaacagtccgcagaccagatttaacatttgcaacgatggatcataatattccaacgaaagatgtttggaatattaccgaccgcattgcgaagcagcaactagatacacttcgggaaaactgtaaacaatttcaggtgccattagcggatatcggagatgaagagcaagggatcgttcatgtaataggaccagaacttggactcacacagccaggaaaaacgattgtttgtggtgatagtcatacagcaacacacggtgcttttggcgcactagcgtttggtattggtacgagtgaagtggaacatgtattggcgacgcaaacgttatggcaacgaaagccgaaagcaatgggcattgagttaaaaggaaagttaccgcaaggtgtttatgcgaaagatattattttacaccttctttcaaagtacggagtagcagttggaacaggttacgtaatggaattttacggagaggccattcatgctatggatatggaagagaggatgacgctttgcaatatggcaattgaagggggagcaaaggctggcattattgcaccagatgaaaaaacggttgcttacgtaaaagggcgtaaatatgcaccgaaagactatgaatctattaagaaaaaatggtcagaactttatacagatttagatgcagtttatgatttacatattctagtagatgttacggatttagcgccgtacgttacgtggggaacaaatcctagtatgggcgttcggatcgatgagaaattgccagaaaagcatgatgcaaatgacgaaagagcgttttcttatatgggattgagtcccggacaaagtacgtatgacattccagttcaacatgttttcattggatcttgtacaaattccaggctttctgacttagaaattgctgcatctgtcgtgaaaggtaaaaaagtaaaagaaggtgtgcgagcacttgttgtacctggatctcaaagggtaagagaagcagcgatgcataaaggattacatcgcatatttgaagaagctggatttgaatggagagagcccggatgctcaatgtgtctaggtatgaatccagatcaagtgcctgaaggggaacattgtgcctctacgtcaaatcgcaattttgaaggaagacaaggaaagggagcacgaacgcatttagttagcccggcaatggcggcagcggctgcgttatatggtcattttgttgatattagaaaggagagttatgatggagccatttcgtattcataaaggtactgccgcagtactgatgaatgataacattgatacagatcaaattattccgaagcaatatttaaagagaattgaaagaactgggtttgggaagtttttatttgatgagtggcgatatgataataatcgccaagaaaaccctaatttcccgcttaatgcacaagaaagaaaaggagccagtatattaatcacaggtgataattttggatgtggctcgtcaagagaacatgctccatgggcgcttgctgattatggtttccgcgttattatcgctggaggatttgccgatatcttttatatgaattgtatgaagaatggcatgttaccgattgtaatggataaagatatgcgtgaacaacttgctaaaacagatgcgagggaacaaattacagttgatttagaaaatgaaataatgacaacgaatacgcatagattccattttacaatcgagaaaatgtggaaagagaagttattaaatggtttagatgaaattagtattacaatgcaatatgaacaagaaataaaagagtatgaaagaaaagtggctttacattaaaaaagtgacggaatattaaaaatgtatttacattcaaaattaactgttatatactatgtgaaaatcagaggagaaagggagtaagtattatgaatatcgtgcaatctattacaatgcttacacaactacatcatcatacatgaaacccttgaacctagcgtgaaaacgtgtaggtacaagggttattcccgttgtacctacactctactgaagagccttgtaggtattttgtctacaaggctctttttattttcggcttaggggaatgaaataggcatacattagaaggggaaaggtgtgaaaatttagatgacaaaatggaaacgagcaaacccgaatggaacgagagattatttattcgaagaatgtacgttaattgaagaagtagaacagaaattaaggcttacttttttagagagaggttatgaggaaataagaacacctacaattgaattttatgatgtttttgcatttcaaaatagaccgatagatgaagagaagatgtataaattttttgatgaaaagggaaggattatcgttttacgtccagatatgacaattcctttagcgagagttattggaacacagagatgggatacgccacttaaagtgacgtatagcgggaatgtatttcgagcgaatgaatcccattctggaaaatataatgaaatcgtacaaagtggtattgaagttatcgggattgataatgtaagagctgaaattgaatgtgtaataagtgtcattcaagcacttcaaaagttgaaggtgcaatcttttacaattgagattgggcaagtacagttatataaatgtattgtaaaaaaactctccatccatgatgaagaagaaagggtacttagaacgtatatagaaagtaaaaattatgcagccctctcaaattttatcggagaaaagaaattaaatcgatgcgatgagacagtaaggttacttgagaaattgccaaggctatttggaaatttagaagttattgaggaagcagaaaagcttgcttcaagtaatgaaatgaaaatggcaattgcaagaataaaagaaatgtatgaaacaattgaaacgttaggatatggttcttacatatcaattgatttgggtatgattcaacacttagattactatacgggtgttattttcaaaggatatatatatgaaattggagaagaaatcgttagtggcggaagatacgatgagctaattggcaattttggagaaatgctgccagctgttggactcgcggtacaagtaaatcaaattgtgaaggcgctgcaagagcagcaagaaccatatgaacgaaatcaaattgatattgtgattcattatgagttaaatagattagcggaagcagaaaggttacgaaatttacttcgaaaggatgggaagaatgcttggttatctctattctctaatttaagcgatacctttcaatttgcaagaaaaaataaaataggaacggttgttgaggcaaagaatgaatatttagtggaatatgtatggaatgagaaatgggtagtccagaaagaaggagaggcttcatgcgtaacattcaaattgcgttaacgaaaggaagattagaaaaacatgtcattccactttttgagcagattggaattgattgttccgagctcaaaaataaaggtcggaagcttgtatttcaaagtaaaaatacaaatatttcatttattttagtaaaagcggttgatgttgctacttatgtagaacatggggtagctgatattggcatcgttggaaaagatattttaatggaaaacgagaaagatatttatgaaatgctggatttaggagtggggatttgtaagttttgtgttgcttctattcctacgtataatccgaagagttaccggaagaaaagaatcgctacgaaatacccacatattacttctacttattttcatgataagggagaggatgtagaaattattaaaatagaaggttctgtagaaatcgctcctcttcttggattggcagatgcgattgtagatattgttgaaacaggaaaaacattacaagagaatggactcattgtatttgaggaaatgtactttatatcggctcggatgattgtaaataaggcagccttaaaaactaaaaaagacgaaatattcagcattataaatatgatggagcaagaaatcttatcagggaaataggaggatttaaaatggaaatcatttatgaagactttaaggaggcattatctaaaataaaagtgctaagagaaaacgctaatataatagaagaaactgttcaaagaagtgtaagagaaatcattagacatgtaagggaaggaaatgatgaggctttatctttctatacaaaaaagtttgatggtgtagagatgaaagattttcgtgtaagtgaagaagaaatacagcaagcgagtatgtttgtagagaattcatttttagaagctttaaaagaggcgaagaaaaacattgtttcgtatcacgaaaaacaaaagaagtattcaatcttcgattgtgaaagtaaaggcataattagagggcagcttattcggccattagaaaatgtaggtgtatatgtaccaggtgggacagcttcatatccttcttcagtattaatgaatgtattgccggcgaaacttgcaggtgtgaaaaaaattgtaatggtaacaccgccgaggaaagggggaattgatcctcatatagtagctgctgcaaatcttgcgggagtagatgaaatttatacgataggtggcgcacaagcaattgctgctttagcatacgggacggaatcgattccgaaagtggataaaatagttggaccgggaaatttgtacgtcgctctagcgaaacgagaagtatacgggatagtaaatatcgatatgattgctggtccatcagaaattgtagttgtcgcggatgaaacaggtaatgcaaaatatatcgcagcggatttattatcgcaagcagagcatgatgagagagcaacggcgatttgtattacaacgaatatggaactagctaaagaagtagaaaaagaggtagaaagacagttagaaacgttaccaagaagtgaaattgcacgtgaatcaataaatagaaatggagccatctttatcgttgcttctttagaggaggcactaaagttatcaaatgaaattgctccagaacatttagagttacatataaaagaaccgatgaatgctctagattatgtgaaacatgcaggctctattttccttgggccatatgcacctgaaccgctcggggattatttggcgggaccgaatcatgtattaccaacgagcggaacggcaagatttttttctccgttatcagtcgatgatttcgtgaaaaaatcaagttttatttcttatacagaggaagcattaaaaaatgtacagcatcatattgtagagcttgcaaataaagaagggttacatgcacatgcgagagcaatccaaataaggtttgaggaggaaaaataatgcgtcagtccagtcaagcacgtgagacgacagaaacaaaaattaaattaagtttgcagcttgatgaaagtacgagtgtatctattcaaacgggggttggttttttcgatcatatgctgactttatttgctagacatggaagatttggattgcaagttgaggcagaaggtgatgtatttgtcgatgcacatcacaccgttgaagatgttggaattgtactcggaaattgcttgaaagaagcattgcaaaataaagaaggaattaatcgttacggttccgcgtatgtaccgatggatgaatctttaggatttgttgcaattgatataagtggacgctcatattgtgtatttcaaggggaattaacaaatccgaagctcggggattttgatacagaattgacggaagaattttttagagcagttgcacatgctgccaatattacattacatgcgcgcgttctatacggaagtaatacacatcacaaaattgaagcattatttaaagcttttggtagagcgcttagagaagcggtcgaaaaaaatgccaacattactggtgtaaattcaacgaaagggatgttgtaattgattgccattatagattatggaatggggaatattcgcagtgtagagcaagcattaaaatatattgaggcagagtacattgtaacgagtgataaagaagagatattgagaagcgatggcgtgattctaccgggagtaggtgcatttccgaaagcgatggaagtattaaaagaaagagatttagtgtgtgtactaaaagaagtttgtgacataggaaaaccactcctcggtatatgtttgggcatgcaacttttatttgaacgaagtgaggaactaaaagattgtagcgggttaggtttactaccaggtgaaattcggaagttaaaagtttcgtataaaattcctcatatgggatggaatgaattaaggaaggaaagagaatttccgctttggaatggattagtggatggttctttcgtgtattatgttcactcatattacgcggattgtccagatgaaattgtatgcggagtaagtgattatggaatgcaaataccagggtttgtcgcgaaaggaaatgtatttggtgcacagtttcatccagaaaaaagtggcgaaattggcatgcaaatattaaaaaattttcaaggagtggtagaagcatggaaatcttcccagctatcgatttaaaagaagggcgatgcgttagactttatcaaggagagtttagtaaagaaacggtgatgaatgaagatccggtagcgcaggcgatcatatttgaaaagcttggagcggaaatactacacattgttgatttagacggtgcaattgctggcgagtcgttaaatttgcccgtcattgaaaaaatctgcaaggcggtacgtattcctgtgcaagtgggaggaggaattcgttcacttgtaacggtggagaagttattgtcagcaggtgtagaaaaagtgattttaggaacagcagctctttatgataagtcatttttagaggaagcagttcgtctatataaagagaaaatcattgttggaattgatgcgaaaaatggtttcgtagcaacgagaggttggcttgatctgtctgaaatttcttacgttagtttagcgaaacaaatggaaagtttaggtgttcaaacgattgtgtttacagacatttcgaaagacgggacgcttgcaggtccaaattttgaacaattagcgatacttcaaaaaagtgtgggcattcgtctcatcgcctctggaggagtggcatctattcaagatgtgaaaaagttaaatgatatgaatatatatggtgtcataattggaaaggcgctttacgagaaaacgattgatttagaagaagtgttacaggtaacgaagttatgttagcgaaacgaatcattccatgtctagatgtgaaagaagggcgagtcgtaaagggtgtaaattttataggattacaagatgtcggtaatccggttgaaatagctgaagcatataacgaggcaggggcagatgaaatcgtatttttagatattacagcgactcatgaaggaagaaaaacgattatagatgttgtagaaaaaacagcagctaaagtatttattcctcttacggttggcggggggatttcaagtgtgaaagatatgtacaatttactaagagctggagcagacaaagtttcaataaactcagcggcagtgcgaaacccgaagcttatagaagaaggggcagaacactttggatcacaatgtattgtcgtggcaattgatgctagaaaagtagcagaaggtaaatggaacgtatacgtcaacggcggaagagttgacacaggaatggatgccatagaatgggcgaagcgtgttgttaaacttggggcaggtgaaattttgttaacgagtatggatgcagatggaacgaaaagcggatatgaccttcgtttaacagaagaaatttcaaaaagtgtttccattccagtcatcgcatcagggggctgtggtcatacggatcacattatagaagtttttcaaaagacaacagttgatgcagcgttagcggcatccatctttcattatggtgaggcgacagtgcagagtgtaaagcgaaaattaagagatgcaaatgttgaggtgcggttatgaaacctaatttttcaaaaggattaataccagcaattgtcatcgaagaaggtacgaaagaagttttaatgctagcttatatgaatgaagaagcatatgaaaaaacgttagagacgaaaagaacatggttttattctcgttcgaggcagtcgttatggaataagggggaaacatcagggaatcttcaatatgtgcaatctttatatttagattgtgatcaagattcaattgttgtgaatgtgaaacaagtaggacctgcttgtcatacgggagagaagacatgttttcactatcaaattatatagggggatacatatggaaaatgcctttaagttgctgtataaaacaattgaagaacgaaaggaaagcccacttcctgaatcgtatacaaattatttattttcaaaaggagaagataaaattttaaagaaaattggtgaagagtgtgctgaagtaattatcgcatgtaaaaataatgataaagaagaagtagtgaaagaaatggttgatgtattttatcactgtttcgttttattagctgaaaaaaatattacattggaagatgtcatgcgagaggtgaaagaacgaaatggaaagctttcgagagttggggatagaagggaaatagatacattataagggggaatgtatatgaaagtagattatcatcttcacttagaagaaggaccgtattcaataggatggcttgctaaaataaatgaagcgctggaacgttatgaaccgcttcaagaaaggcattctattgattggcttatgaaaacacaagagcgtttgcaaaagcgtgtgaaggaagggccatttacaacagaatggatggacctctatttagaagaagctgtgcgaaaaggtataacagaagttgggattgttgatcatttatatcgttttcatgaagcgaaaggatattatgaaaaatatgtagatattagtgattctaagctcggtcgtatacagaaggaatggttagatcaagtaagggtagtttcactgtatgattttacaaaggtcattgaagaggcgaaagaacgatggagtaaaagaggtgtcacacttaaacttggaattgaagcggattattttattggttgtgaaggagagttaaaagaattattagcgctaggagactttgattatataattggttccgttcattttctaaatggctggggatttgataatccagatacgaaagaatattttgagaagcatgacctacgcgcattatatgatatgttttttaaaacagttgagagtgcgattcgtaccgagttatttgatattatcgctcatcttgataatataaaggtatttaattatcgattggatgagaatgaacagctttcttattatgaggaaattgcctgtgcgttagtagaaacgaatacggcaacagaaataaatgcaggattatactatcgttatcctgttcgtgaaatgtgcccaagtccactatatttacaagtattagctaagtatggtgttccaattacgatttcttcggatgcccattatccaaatgatttagggaattatgtacaagaaaatgtacaaacattactagctcacggtgttactcaggttgcaacatttacgaagcgagcaagagtaatgaggtcgcttgaagaagaagtaacaaattcaaaatgaaacgcaattttttgatgaaaaccgtcctttttgttcaaaataagaaagaatgaaaaggagggtaagaaatggcgaaacaacaaaataaacaaaatgtacaaggtgcacagcaacaagcttatacttctgaaacgaatgctgaatctcaatcggttattgaggagcaaattagcgatacggttgcagaaggaacgattgatgtgaagcttggaaaagaatcgcaggaaaaagcgtaagaaaaggggagagttgcatctcctcttttttcatggaaaagtgtcgatttttaaaactataatcaaattccttggtttttatatgtggatttcttacaatgaaatataagagatatcttattttctatagaagaggtgttagtagtggcaaaaatattagtagcgggaaaaattccggaaattggattagaactattaaaagatcatgatgtagaaatgtacgataaagaggagttaatttctatagatgaattaacagagcgtgtaaaagataaagatgcattgttaagtttactttcgacaaaggtgccaaaagaagttattgatgcagcgcctcatttaaagattgttgcaaactatggtgctggttacgacaatattgattacaagtatgcgggcgaaaaaggaattgcagttacgaatacaccgaaagtatcaacggaagcgactgcagaattaacatttgcacttcttttagcagcggcgcgtagaattcctgaaggggatacgttatgtcgtacgactggatttaacggatgggcaccgttatttttcttaggacgagaagttcatggtaagacaatcggaattataggtcttggagaaatcgggaaggctgttgcaaaacgtgcgaaagcatttggaatggatgttttatatacagggccaaatcgtaagcttgaagctgaaagtgagctgggggcaacgtatgtgatgttggaagaattattacaaacagcagactttattacaattaactgtgcttatagtccaaatttacatcatatgattgatgaagagcagtttaaaatgatgaagaaaacagcgtatattgtaaatgcttcacgtggaccaattatgaatgaagcagcacttgctcatgcattaaaaacgaatgaaattgaaggagcagctcttgacgtgtttgaatttgaaccgaaaattacagaagagctaaaagaattaaagaatgtagtacttgctccacacgtagggaatgcaacatttgaaactcgtgatgcgatggctgaaatggctgtcagaaatattttagctgtattaaacggcgaagagccagtaacacctgtaaatcaaaaggtattagttacaaaataaaaagaaaccttccggactcggaaggttttcttatttttctttattcgcttttttagacggtctttgtctaatgaattgagataacatgtacaaaatatatagtggaatggcaataaataagaaaacagaaaaatttccaaatcctgtttgatacattgtaataatgattccaactaaaaatagtgtaataatgatgctatatcgtggaattggtacatcttttaaacttgggatacgaatgcggctcaccattaaaaatgcgaacgttacaaatacggtaataagaacgatttttggaatggtatgtgaaaataatgttaagaaagcaacaagccctcccgctgctgtaatcggtactccagtgaaatatttcattgaagtagaagatggtgttacattaaatcgtgctaaacgatatgctccgaaaagagggaataatcccgctatgtataatccgatgattccgtagtttgagaaagatgtgtaatacattaaaacagctggtgctgcaccaaatgttacgacatctgcaagcgagtcgagctcttttcccatttgtgaatcaacacgtaataaacgagcaacacgaccatcaagactatctaacatcatcccgataagtactaaaatagcagctgatttataatatcctaaagatgcatagccgattgataaaaatccgctatataaatttccgagcgtaaataagtttggaatagctgctctatacaaaatctgatcccttgctttctgtaataaattcttaattagtgtatgaaagtttacttattttatcataccataaatttattcctcatacgaaagaaattaccaatttgtgaaagatttcatagaaggatggtttgaaaattaagtgaaaataaaaagaggaagcaacttgtataaagttgcttcctttactattcaaatttcgttgtcatcgttccagttttatatcgattattaggatcgaagcgtaataaatctccataaattaatttatcggagagttttaattctgtttttgctttttcaatatacggctgacatagcgtcatgtcagcttcttcacccgtacttcttttgtagcacatattttttgtataaacatactcttcagaaacaaagctaccatcacgcattaccataagcgggtctttctctttaataaataagtcagttccaaattcaacggatttatttgttttaataccaagtaaatgaaggagcgttggcttaatatcaatttgaccggatactttagaaacaacttttccttcttggccaggcacatgaataataagagggactcgttgtaattgcatagaatcgaatggtgtaatagtatcttttcctaggaactgtgccatagctgcgttatggttttcggaaataccgtaatgatcaccatagatgacaataacggtattatcatacaatccttcttcttttaattgtttaataaataatttaagagcttcatctgtgtaacgaacagttgggaagtagcggtttacaacaccactttccgagttgaattcatcaacatattgatcttccggatttagaagaaatggaaaatgatttgttaatgtaataaattttgtatagaacggttgcggtaaagattttaactttggaatagattgttcaaagaactctttatcttttaatccccaaccgacagacatttgctccgttcctgcgtaatcatttaaattaaagtaacgatcatatccaagcgcaggatacattacatcccgattccaaaacgttttatcatttgaatggaagacggcagaagaatatccgtatttctttaattgttctggtgtcgctgtgtattcatttgttgcatgagtaaagaatacagaaccacgatctagcggataaagtgagttttcaacgataaattcagcatcagaagttttaccttgtccagtttgatgatagaagttatcgaaatagaaactatccttaataaattcatttaaaaatggtgtaatttcttttccatttatttttttattaataacaaagctttgtgtagattccattgaaattaaaattacatttttaccttttgcagctccaaataagtttttatcaacttgtttgtcttttgagtctgtatagtttttaatttcagaaaacccatccccacttgcaaatacacgctcagctgaggacttggattgaagcgtaatatcaaatagatgatatgtgtataaacctaaattcttcacgacagtttgacggtcaaatgagcgtgagaacatttgtggtttataaataactgatacaacaatttgtagtgctaataaagctgttacaccgctaaagaaagttcgcttctctgagcgggaaagtggtgttttgtcgccaaatgatgggaatttacgcgaaataaacattaaaataattgcatctgcaaataaaagtaatgttttgtacgtaaagagttcttttatacttgtccctaaatcagccatattgtttgtttggaataaaactgggaaagtaacgaaatcgttatagaacccataaaacattgcgtttccaaataaaataaatgacagtataaaactgattccaattataattcggtttcggtgcttagatgcaagtaaagctaagccgaaaaataaaagtaacgcagctagtggattgataaaaagcatgaattcttcaaagaaattatcaattttaatatcaaatgctagcttgtacacaatatatgttttaatccatagtaaaacgactgcaacgagtgcaaatcgcagttttggaaacagatgttgtagcataatatactcctctcctaaaaagcatgacagttcttgagagtcagtttgcttaacgactcattttatatatacgaacagtcctttgttattatgattattatactatgagtatcattatacgaaaataaaagaaggttgtgggcttttttataataatcgagtagaaaaagagtggtgggagacaataaaacagaatttctatgtatgataattattgtacgcagaaagaatcgcgtgataatacggaggttataatgcgaaaattattatattttatagcatgcagtagtgttatactttttacttcaccgagtgtgtcggtagcccaatatgatgcacctcttatggaagatgcactttattctgttttatttccaaaaataaataaagcaattgaaaaacaatatggaagtttgaaaccttatcaatgtcctaaaattattagtttaaaaaaagtgtatagcggtacatatttatttcaagcaagtattgaagtgacaaagtatgaacgtgttgctgggaaaattgctccaccatttgagaaggtaacgattacatttaataacgaagaaggcgaatgggaagtaacaaaggtattagtaaagcgcttaccagacgatacgaaattaaactgcaaaaaaacaatataaaaaattgtttgacaaataaaatggtcctttggtattgttaatagcaacaattagatgtttgaaaattaaatagacttacctcatctactctcaaaggtagaggccgcgataggaaagagtaagctatgggagatttaatggaatctgtgatcataggttgaaagggactattgccgaaatataagaataaccatcttattcatatattgggactgcattgaataaatgtagtactgtcataagatttattttatggagagctatttggagatgttgatgcggtttcttattttgaggagataacaactcgtttattttttcaatatatatttttcctaataagaaacgcgtgtgaacattgttccgcgcgttttttgtctatctaaaagcgtgctgcaatgaatagaagattggggttatgagttttagaggaaataagggaggaatttaaatgtatttacacggcacaagccgaattaatgggcaaggacacttagaaattggagggtgcgatacgacgcagctagcaaagcaatacggaacaccactttatgtatacgatgaagagtctattcgaggaaaatgccgagcatttcatcgtgcttttaaagaaagtggtttctcttatcaagtagcatatgcaagcaaggcgttcttgtgcatggagatgtgccgagtagctcgtgaagagaatatgtcattagacgttgtctctgggggagaattatatactgcgctccaagcaggatttccggcatcacgtattcattttcatggaaataataaaacagaagaagaaatagtgatggctcttcaggcgaatatcggttgttttgtcgtagataatttctttgaattagaagttttacacgatttagcgatgcaacatggaaagtttgtgaacatattaattcgtgtaacgcctggagtagaggcgcacacacatgaatatattacgacaggccaagatgattcgaaatttggatttggcgtttcaaacggtcaagcgatgcaggcaattacatttgctttacaaaaatccaattataatgtgctagggatccattcacatattggatcgcaaatatttgaaacagctggttttgttcgagcgattgaagttcttcgccaatttttagtagaagtgagagagcaaacaaactatgtagtaaaagtgttaaatgtaggcgggggatttggaatacgctacacagagtcagatacaccattaactcttgagacatatgtgcgagctgtaacaagtgcagtgagagaacaatttactgtatgtgaatatccattgccagaaatatggattgaaccaggacgtagcattgtaggtgatgctgggacaacaatttatacagttggatctgtgaaagatattcctggtattcggaaatatgtatcagtcgatggtggaatgacagataatttaagacctgctttatatagcgcgcgttatgaagcgatgttagcgaatcgagggaatgatgagaatgaggaactcgtttcgattgccgggaaatgctgtgagagtggagacatgttgatttgggatattcatttaccaaaagtcgcttcttctgatttactagcagtttcctgtacaggagcatacgggtactcgatggcgaataattacaatcggattcgaagaccagccgttgtctttgcaaaaggcggaacatcgcaagtagttgtggaacgcgaaacatatgaaaatattattgggaacgatcgcatacgtattaaagagcttgtctaaatagaaaaaggggttgttcggatgggcaattccttttttgtaaaaataaaataattaaaatatatcggaaaactaggattgaaaaaaatcagaattatgataaaatacaaatacaaagcttatcaagagaagcggagggaactggcccgaagaagctcggcaacctgcttatagaaagcaaggtgctaaatccagcaaaatggaatccattttgaaagataaggtaaaatatattaccgaacagtcttttcgaaatgggaaagattttttttatgaataaaaaggggggctgttcgcgtgggtgtacgggaacattttgatgaagtatccgagaagattgaagcgatgcttgctgatatgaaatatggttcaattacaattgttgtgcaagatggaaaagtaattcagttagagaaaagtgaaaaagtacgtttaaagtgaaaagcgctgactagaaaaactagaggcggttttaacctattttcattaggttaaaaccgtctttttgcttttacagggggaaaaaacatgttgacgtatgaaacgtgggaagaaaatgttgtttcgttttcggaagaagatgaaacaaaaggcgcgctatcagtattaaagtgggcttataaagaatataaagatgaaatcgtctacgcatgtagctttggggtggaaggtatggtattgctgcaccttataaaccaagtaaatccatctgctaaagttgtatttttagatacaaatgttcattttcaagaaacatatgaattaattcaaaaagtgcggaggcgatttccttcattaaatattatagaaaaacaaccggaacttacgcttgatgaacaagagaagttgcatggcgagaaattatgggaaagtaatccgaatctttgttgtaagattagaaaaattttaccgttagaaaaatcattagcagcggaaaaagcgtggatatcgggcttaagaagggaacaatcagaaacacgtaagcatacaaagtttataaatcaagatcatcgttttcaatctattaaagtttgtccactcattcattggacgtggaaagaagtttggcgatatgtatacaaacatagcttgccgtataacccgttgcatgatgttggctatccaagtattgggtgtgagaaatgtacgttacctgtaggggatggtggcgattcaagagatggtagatgggctgggaaagtgaaaaccgaatgtggtcttcattaccaataagatgaatcttgaaataaagctaagagaggatatagaaaaatgagcatagtaaacgaattagtaaaccgtatagatgagacatatgacgtatcacaaattgaaaaagaaattaaattagacaatattgcgttaagtgatttagaactattggcgacaggtggatatagcccccttactggttttttagggaaggaagattatgattcagttgtagaaacgcttcgtttagcaaatggtagtgtgtggagtataccgattacattaccggtaacagaaaaagtcgcagaaagcctgaaggttggagaggaagtaaagcttgtcaacaatggaaatatatacggtgtcattcaaatagaagatatttttgtaccagataaagaaaaagaagcgttacttgtatataaaacaacggatgaggctcatccaggagtgaaaaaattatatgaacgaccaaacgtttacgttggaggaactattattctaacaaaacgctttgaaaataatcaatttccttcttatcatttagacccaattgaaacgagggaagcatttaaaaaacgtgggtggaaaacagtggtcggatttcaaacgagaaacccggtacatcgtgcccatgagtatattcaaaaatctgctcttgaaattgtagatggtctctttttaaatccgctcgtcggagaaacgaaatcggatgatattcctgctgatgtaagaatggaaagctatgaagtacttcttcaaaaatattatccgaaaaatcgtgtctttttaagtgtatttcctgctgccatgcgttacgcaggaccaagggaagcgatatttcatgcgttagtaagaaagaattttggatgtacccactttatagtagggcgtgatcatgctggagtaggagattattacggaacgtatgaagcgcaagaaatcttcacaaattttacgatagaagagttaggaattacaccactattctttgaacatagtttttactgcacgaaatgtgaagcgatggcttcaacgaaaacatgtccgcacggaaaagaagatcatgttattttatcgggtacgaaagtaagagaattattaagaaacggtgagattccgccaagtacatttagtcgtaaagaagtagtggaagtgctaattaaaggcttgaaaaaagaagtagtaacagaatagggagagaacgagatggatacgaatattacttggcatacagcttcggtttcaaaagatgagagaagagtgaagaatggacatcatagttttgtaatttggtttactggtttatcagcttcgggtaaatctacagtagcgaatgcggtcgctcgtaaactgtttgaaaagaatattggaaattatgtgctggatggggataacattcgccacggtttaaataaagacttaggattttctgaaagtgatcgcatggaaaatataagacgtattggcgaagtggcaaagttatttgtagatcaaggagcagttgtccttacagcatttatttcaccatttcgagtagaccgcaaacaagtaagagatttattagcggcagatgaatttattgaaatttttgtgaagtgtccgattgaagagtgtgagaaacgtgatccgaaaggactttataaaaaggcaagaaaaggtgatattaaggatttcacaggtattgattcgccttatgaagagccagagcaagcggaattaattgtagaaacgcacaaatattctattgaagaatgtgcagaacaaatcgtgaagtacttacaagagcgtagttttatatagggggataaacaatgagttatgaaaaagtatgggctaacaatgaaaaattaaatcagaccgagaaaaataaattagaaaaagatggcttagaaatttttaatgatattccttactatgcggaaaatggtttcgaatctattccgaaagaagagtgggatgcctttaaatgggcaggcttgtatttacaaagaccgaaagaagctggttattttatgatgcgggtaaatattccgtcagggattattacaaatgcacaggcagaagtacttgcttctatcgctgaagattatggacgtgatgtaatagatattacgacgagacaggcgattcagtttcactggttagaaattcagcaaattccagatatttttaaaaggttagcaagagttgggttatcttcagcgggggcttgtggtgatataacgcggaatattacaggtaatccgcttgctggcattgatgcaaatgaactatttgatacaacgaatattgtaaaagaagtatatgattacttccaacataatgaagagttttctaacttgccacgtaaatttaaaatgtctattagttctaatatttataattcagcaaacgcagaaattaactgtgttgcatttacgcctgcaacgaaagaaatagatggtgagaaaaaagttggttttcatataaaagtaggtggaggattatcagctcgaccgtatttagctgatgaattagatgtattcgttttaccagaagaagtgaaggcggtggcgattgcgattgctactatattccgtgattttggatatcgtgaaaaacgtcatttagctcggttgaaatttcttgttgcggactggggagcagagaaatttaaagagaaactaatagagtatacagggtctttacaaagtaaaggggaaagtgcattcaaaggatggaatgcaggctatttttatggtgttcaagaccaaaaacaaaagggattaaaatatgtaggttttaatgtaccggtaggtcgtttacatgcagaagaaatgtttgagattgcaagaatcgcaaagcaatatggaaatggacaaattcgtacatgtaactcgcaaaacttcattattccgaacgttcctccggaaaatgtaaaaggattacttagtgaaccgctgtttgaagtgatatctgctagcccgaaatcatttattggtcatgcggtttcatgtaccggtattgaatattgtaatcttgcactagtagaaacgaaagaaagattacgaaaaattgcagaatacttagatacacaaattgcactcgatgttccagttcgaattcatatggtaggctgcccgaattcatgtggtcaacgtcaaattgctgacattgggttacaaggggtgaaaatgaagacgaaggaaaaaggcattgttgaagcgtttgaaatatacgtaggtggaacattgttagatggcggtgcctacaatcaaaagttaaaaggaaaaatagatggcgaggatctacctgatgtactggcatcatttataagttatttcaaagagaataaattaccagccgaaacattttatgattttgtaggtcgtattggtgtagatacattacaaatagcgttaaataacgtgctagaagaagtaatagcgtcttaggagggacgatatggatttatatcgatttgaagctgtgttagtaaatagtattgttccgattgttgttgttgctcaaagtgaagaacaggcatttaagcttgcggagattgagcttgaaaagcattttttaccgttgccagaggtaaaagagatttctttgtttgaaaaaaagaagattcgaaaaggtggggcatttgttgtccatgagtagagatcagtaatacgaaaaaataaaaacttccattcttatatacgaatggaagtttcattttaatagaagaaatgaggagagatgatgggaaaggtttatattgttggagcgggtcctggcgatccagatttaattactgttaaagggttgaaatgtattgagaaggcagatgttattttatatgaccgacttgtgaataaagagctgctttcacacgcaaagcctgacgcggatttaatttattgcggaaaactcccgaattatcacacgatgaagcaagagacaattaacacgtttcttattaagtatgcgaaaaaaggaaaagttgtaacgagacttaagggcggcgatccatttgtgtttggtagagggggagaagaagctgaagcattagcaaagcaaggtgtaccatttgaaatcattcctggtatttcagctggaatagctgctcctgcttatgcgggcattccagtgacgcaccgtgatgcaagtgcaagttttgctattgtgactgggcataggaaagaaggtgctgaagaagaagtgaaatgggagagtttagcgaaaggtgtagagactttagcggtatatatgggggttagtaatttgccctacatatgtgagcaacttatgaagcatggaaaagataaaagtacgccagctgctattattgagcaggggacgacgtctatgcaacgcacagttgttggaacgttagggacaattgtagatgttgcgaaaaaagagcaaattcaaaatccgagcatgattgtaattggagaagttgtccgttttagagaaaaaattcattggtttgagaagcagacagaaaatgcttatcaagtaagtggagtgttgtaaaatgaaagccgtcttatatatatgtcatggaagtcgtttgaagacagcgaaagaagaggcgattcaatttattacatcgtgtatgaaccgtatagaagcgactattcaagaagtttgttttttagagttagcgaatccttctattgaagatggttttcgtacatgtgtggagcgtggggccacggagattattgctatccctgtttttttattagcggcaggtcatgtgaagaaagatattccgtgtgaattggtaaagcttaagaatcaatatccgaatgttaaagtgacttatggtaatccgtttggtgtatcggaaacacttgttaaatcggtgtatagcggaagtggcatcgaacaggaagataaaaatgaagtgacgttacttctcgttgcaagagggagcagtgatcctgaagtattaagagatgtaaactggattgcttctttatttcaaacaaaagagaaggttaaaaaagtagaagtttgttatttagcggctgcagagccaaaatttgaggagaagttaaaggaagttatagaacgaaaagaaaagaacatcgttgtactgccttacttgttatttacaggtttacttatgaaacatattgagaaagaagtgcgccaatatgaattggaagagataaaaatcagtccatatttagggaagaatgaagcgtttcaagatatgttaattcagaaaacgacggagttattgaaaggagatcagtatgtatccacttacagtgcgagttaatgagaaacgcgttgttgttattggcgggggaaaagttgcaggatttaaaattattcctttactcaaacagggtgcggatatagttgtgataagtccagaattagatgcgaatttagtaaaacttgtggaagaaaagaaaattcgttggtatcaaagagaatatgaaaaaagtgatattaaaagtgcttttttagttgttgcagcgagtagtgattcaatattaaatgaacaagttgctgaagatgccgctgagaatcaattagtaaatgttattacaaatccagaaagtggtaatgttcattttccggcagcgattcatcgtggtttacttaatatagcagtttctactgggggagcgagcccgaagctcgcaaaaaaaattcgagatgatattgcaaataaatatgatgagacatatgaatcgtatttagattttttatatgaagtaaggttgaagttaaaagatttacagttagaaaagagggaacgaaatatattgctccaagaagtgttgaaatcagtatatgtgcaaaacgaggggaaaagagaaagttttttacgagaattagaggaaaagattttaaaataataaaagataaagtgcgctttacaaatataaaaatataatttataatcacaagtaacttcaatagatgaaatcgatgagcaagaagagtacgtatatttgatgcgttcagagagctggggttaggtgggagcccggtacgataaaatgtacagaatgggcttgcgagaggtatgttgaacattgtagtaggcaacccgggttccgccgttaaaaggatagagtatcggaattattcctgtacttgaacaagtgggatttatcaatccaattgaggtggtaccacggtatttacattacatatatcgtcctctacatgcatatttgcgtgtaggggacttttttattttctaaaggaggtgtgcgagtatgaaatgaaagtgtataattaacaaaagtttaaatattcagaaaaggagaatttatgatgaaagaaacacagcaatggacgtcgaaaataggctttgtactcgcagcagccggagccgcagtaggtcttggtgcgatatggaaatttccatatgttgcaggtaatggcgggggaggcgcattcttccttgtatttttactattaactttatttataggtatgcctcttctaatagcggagtttgttattggacgtagcacgcaaaaagaggcggttacagcttataaagtactagtgccaaatagcaaattatatccttggattggtcgtatgggagttgttacttgttttagtgtactatctttttatagtgttgtaggtggatggattttactttatttatattatagtgtgacaggaagtttctggaatggagcagctgattatggacaattgttcggtgaaacgatttcaaatccattaagtgcgattggagcacaatttatctttatgctttgtacgatttttgttgtaagtaaaggtgtagagaaaggtatagaaaaggcaagtaagtacatgatgccgctattatttattttatttattgcgattattgttcgtgcgttaacactcgatggtgcttttgctggagtagagttcttcttaaagccagatttttcaaagcttacagcagatacgattttatacgcgatgggacaatctttcttctcactaacagtaggtgcctcagtaatggtcacgtatagttcgtatttaaagaaagaggaacatttagcgaaatcagcaacatctattgtaagtttaactgtttttgttacagtacttgcaggattagcaattttcccagcgattttcgcattaggagtaaaaccaactgaaggaccaggattactgtttatcgtccttccagcagtatttgcaaaaataccatttggtcaatttttctttattatgtttttaattttattcttctttgcgactttaacatcagcaatttcaatgcttgaaattgtagtagcatctgttgcgaaaggtaatgagaagaagcgtccgtcagcatcattattaatcggtattcttatttttgcagtcggtattccatcagctttatcatttgggattatgagtgacgtgaaaatattcgggaaaacattctttgatttagttgacttttcggtaagtaacgtattgctgccgttaggagtactagctatttcattatttgtaccaaataaaatgagtaaagagttattgatgaaagaattagaagtgacggaaacgaaggggaaaacgttatttaacatttggttcttcttacttcgttatgttattccggtaactgtaataattgtatttttaaatgcgataggtgtatttaaaatgtttgcataaaaaaaggcggggatctcccgtctttttttatgtggatgttgatgagtgtaataaacgattatatgctttataggctgtagtgactgcaaggaatgaaccgattaaaaataatactgagccgccaaatgtaaatatccggccaatatacgtctctctagcttcttctattttttgttgtaattgcgtattcatattgatcaccccgtaaactataggcatttagttatagtctatgtagaatgcctatattgtgtgaagtgtaaataaaaaacctcggtaggcaccgaggttttttataatccgatataaggagatgggtcaactgcgtttgtcttgccgacattccattctccaagatgaagttcgaagtgtaaatgttgtccgtatgattggcccgtgtttcccataaatccaagctgatcgccttgttttacagtttgtccattcgatacagaacggctattcatatgagcatatactgtcgtatatgtttttccgtttatacggtgagataaatacactacgtttccgtaactagatgataattctgaacgaataacaacgccatctgcagcggcgataattggaaccgttcccgaagcagcgatgtcaattcctttatggttatctaaagaacgtacaccaaatccggaagtttttgatccagctgctggtttgataaagccaccgatgtttgtatcatgtggtgttggggccgcttgagttgcttgagcagatttagtagcttgttgtttgcgagcctcttctgcctggcgagcttcttcggcccgtttttcttcttcaattgctttttgaacagcttgacgttgattttctaaaatgcctttggattcttctaatccttcaatctctgaatctacttttgctactttcgtatgtagatcgttaataagagtttgttgctgttgttggttattttgtaattcttgctgtttttgttctagtttttgctcagattctttcagttgttgttcttttttctcaacagcctctttttctgacgttacagcattttgatcagatgtttgtttttttacaatatctgtatcgttgtttaatattaaacttacggagtacatattatcaacaagatcggcaatatttgaagaatttgttagtacctctgtaatgatatttgtacgaggtttttcttgcatagattgtaatcgttgtttaataacttcctgacgtgtatctatgtttgtttgtaattgttctatatgtttctttttgtcagcaattacttgttgagttttgctaatttctttttttgtatcgtttaattcagcttcgtttttattaatagaagtagttaattcatcaattttcttctgtaattcttgaatttctttttctatttgttctttctcgactgatttattttgtaagtcactttgtttgccttctaattcagattgaatgttagataatttatcttgatttgtttcagcgtatacgggtgaaagtaacggggaagcaaaaatcgttcctgctgctaaaacactaaacgctgcaaatttctttttcatagttgtctgactcctttctctatgaatgttatatatcataagaagaagagtgtctatcgttgtaatcataatgtaaagaaaactttataaaattgctaagttttgtcggaatttatcatttttcaactgtaattgtcatagtacatacattttattcatatgtgtaacaaaggtatattttggaattaatctgtaaaatgaagaaggaaagtaatcgtttttatgaggtgaaatattacttggaaagctaataaaacactagtgaggaatcgttctcatgttaggttttctgacatgggtctgctttttgtcaagaaaattatttgtgttcgggcaaagttattttgttgtcagatttaaatttttgatttatgatttttaacagggacaaaatgtagtgaattgtcgaataatatgtaatactcttaatttcttagttttatagagatagaatgagagatagagtgacacatcgaagagggggttacaacaaatatgaaaagaataggacttgcatggcaaatattaatagggcttgcgcttggtattgcggttggggcgattttctttgataatccagctgttgtgaagtacttacaaccaattggtgatattttcatccgattaattaaaatgattgttgtaccgattgttgtagcaagtattgttgttggggttgctggtgttggcgatgttaaaaaactaggtcgactaggcggaaaaacaattctttactttgaaattattacaacaattgcaattattgttggtctattaatagcgaatattttccaaccaggaaaaggcgtaaatatggagcagttaacaaagacagatatttcgaaatatacacatacgacagagcaagtacaaagtcattcatttgcagatacatttgtaaatattgttccaacgaacattatgaagtcgttagctgacggagatatgcttgctattatcttcttctctgtactatttggtttaggtgtagcagcaattggtgaaagaggaagaccagttcttcaatttttccaaggtgtagctgacgcaatgttttacgtaacaaaccaagttatgaaatttgcaccatttggtgtgtttgcactaattggtgttacagtttctacatttggtcttgcttcattaattccattagggaaattactaattgtcgtatatggggcaatgatcttcttcgtcgtagttgtcttaggccttacagcgaaaatatttggaattaacattttccaattctttaagattttaaaagacgagctgatcttagcgtattctacagcaagctcagaaacagttttaccaaaaatcatggagaaaatggagaaattcggttgtccgaaagcaattacatctttcgttattccgacaggttattcatttaacttagatggatcaactttatatcaagcaattgcggctattttcttagcgcaaatgtacggtattgatttatctattacacaacaaattacattattgcttgtattaatggttacatcaaaaggtatcgcaggtgtaccgggcgtatcattcgttgtattattagcgacacttggtacagtaggtattccacctgaaggcttagcgttcattgctggtattgaccgtattttagatatggctcgtacagcagttaacgttgtaggaaactctttagcagctgtagttatgtctaagtgggaaggtcaatatgacgctgaaaaaggacaagcttatttaaaagagatttctgaaaagggtcaagcggcttaattataatatgaacaagctctcacataatatgtgggagcttttctgtatatagaagaggagcagacataatgaaacgtaaatatggtgacggttcttcgtggaagaggctaatagaaaagagttatacggttaagcaagtggaagagggaatgctcggaatactggatataaaaaaggtgagagagcctagttgtaaagaatatgatggtgaagaactttgtattgcagcggatcagtatacgtgggttcaatattttatagaagggaaaaactttgcgattaccgctatgttagatgatcagaaaaaattagtgcaatattatatcgatgtggcgaaagaatataaaatagacgatcgtggtttaccgtattttgatgatttatatttagatgtagtattattacctagcggtaaggtgtatgtattagatgaagaggagctagaggatgcttataaaagtgtcgatgtcacgaaggaagagtatgagttagcttggtacactacgaaatggatattagcagcaataaaaaataatgaattttattggatttcaatgttgaaagaagaaatagaaaagttaaaatgattgttgtattcgaatttttgtataattaccaaaaaaatctatacaaaaaataattgacttttgttttgtaagcgagtaaagttaggaaagaaattattattaaaaaataaatatgaaaccttcttataaagagaggcggagggactggccctacgatgcctcggcagcggactcgatttcagagtgctgtgccaaatccagcaagcgtgtgcttgaaagatgagaagagtgtttcttatagatgtataagacctcttctcatcggaagaggtcttttgttattcattagaaaaaggttgaaactagggagagatgatactttgaaagaaacgagaggaaatggtttagctttattaccacttgggatatttttggcgctatttattggttctggaattattacaggtgatttctataaattgccgatacttgtagcgatctcaattgctgtaggagtcgctttaatgatgaatcgtaaagaaagttttaatgtgaaagtagagcggttcgctaaaggtgcaggaaatccggatattatgattatggtattaatttttgtgcttgcaggtgcattttctgaaactgctaaaggaatgggcggagtagactcaactgttaatttagcattaactattttaccgccaggatttatcgtagctggaatctttgttattggtgcatttatttcattagcgatgggaacttcaatgggaacaattgcagcattagcgccgattgctgtaggtattagtggtcaaactgatatctcaattgcgcttgcaatggctactgttgttggcggagcgatgtttggtgataatttatcatttatttcagatacaacaatcgcagctgttcgttcacaaggaacagaaatgaaagataagtttaaaacgaactttttaattgtgttaccagcggctattattacaattgtactattagtaatagttacttcagggagtgacacgcagattaaagcacatagctttgattggataaagattttaccgtacgcaggagtactaattacagcgctacttggctggaatgtacttattgtattaactggtggaactgtactatctggtgttatcggtcttatagatggaagttacacgttagaaagtttctttaaaagtgtaacgactggaatgggcggtatgatggagttagtattacttgctatattaattggcggtatggttgaattaatccaatataatggtggtattcaatatttaatgaatgtattaacacgtaatattcgttcgaaaaaaggagcggaatttggtattgctggtttagtgagtatgacgaatatgtgtacagcgaataatacgatttcaattatttttacaggcccgcttgcaaaaaatattgcagatcaatatgaaatagaccctcgtaaatcagcgagtgtattagatcttttctcatgttgtgtgcaaggattaattccgtacggtgcccaaatgttaacggcagcaggatttgcagcgttatctccagttgaattgttaccgtatgcgttttatccaattttagttggagtatgtgggattgtttctattttaattgggtttccaaggttttcgaaagtagctaagaaaaaagagtatcataaaactgcttaatttaatatgaatgttagtaattaaaaaaagtgcagagaatagactctgcactttttttttgcgtaaagggctgaatatgactcggtcttaagtctgagttaaaaacggttcttaagctcgttatggaaagatgaaaaaatagttaagataagagtatcaaatcgaagggaggcaagcacaagatgaaacaatttctagcgtttatcgcagccggtattttggctttaattgctcttggtagtcttgctggtattgtaggattcgcaatcggagcaggagttgtatattggagctataaatcatttgtgcgagctaaatcattttttggaaagttagcttggggtattgttggtttaatcggtttatccattgcactttctcattcgccagcattaatcggtatcgctgctttagtggttttatactacggataccgtgagtggaaaaaagaaaaagatgtagttgttgaatctgctccagaaagttctaaatcatatagcaactttgaagatgagtggaacaaattaatgaaaaactaaaacaataaatcaaattataattaaagtagaagagaggaagatttataatgaaacaatctttattcggacgtgtacgcgatgcaattttagctgattttcataacgtgttagatgagaaggaaagaaaaaatccaattgcgatgttaaaccaatatttacgtgatagtgagcgtgaaataacaaaaattgagaagttaattgagcgtcataaaacattaaaatctaactttgctcgtgagcttgagcaagcacgttatttcgttaataaaagatcaaagcaagctatcattgctcaagaagcaggtgaattacaattgcacgaacgtgcgttagaagaggtagcttattatgaagggcaagtaactcgattagaagaaatgtatgcaggtgttgtagagcaaattgatgagttagagcgtcgtctttctgaaatgaaaaataaattaaaagaaatgcacgcaaagcgtatggaactaatggcacgtgaaaatatggcacatgcaaatcgtcgtatgaatactgcgatgcataaaatggatgaaaataatccattcttacgatttgaagagattgaagatcatattcgtgacttagaaactcgtatgaatgaagagcatgagcgtgacacatttgatatgaaaattgcaaaacttgagcgtgaaatgaaagaaaagaatgatgtatcgttaacgaaagagttaacaaaataatagtagtatattataaaacaggcttatgatatagtgataggagaaaaggtgttggaaagcaatgccttttcttctatgtatatgtgacaagaaggggggagctgaaatgaagaaacatttttcaaagacacaattaatggggatgctcctcatcatatttgggttcggtctttttcttgatatgatacttggacattttgaaccaggtggtctcatttttgcatttattatgcttatgtttggaaggcattatcgtaaaaagaatcgttatgtacggggaaatgtatttttatttgttggtggtatcgtatttttattcttcttattttcatcagcagcatttgttcttgtcgtatttgcttgtttagctttaattggttatcaattgattcaacaagggcatcagcaaaaagcaatgaaggttgaaattaaagaaaaagggatgatagacgaagagaagcaaatatatcgtacagaaccatatttaaaaaatatgtttgtaggcaatgtgcgaatgatggatcatatttatgaacttgaggatattaatgttcaatatggtgcttgtgatgtggaaatagatttaacaactgctatgattccagaaggggaaacggtaattgttattcgaggtgtcgttggtaatattcgtttatatgtgccatatgatattgaactttctttaaatcattctgttattgtcgggcgtgtgctcttgccaggttatgaagagacagggtttaaccgcaatgttacatttagaacagagcagtataaagaggctcctcgacgtattaaaattatttcttcgcttgtcgtaggcgacacggaagtgaggaaagtataatgaagaaacaaaaaaatatttcgtggatgtatattcgttattctatgttgtcctctgttagtatcgcactcatttgtacaattgtatatgtatggaaaagcgagcaacaagtgtatgatttattatggaaggaatccatcgcttctgttccaattggcttgtttattatgactacaagtttacttatcgggggaattgtaggatatgcaatcggttactatatagagcagcgtatacaaggattaaatacgtttctatttgaagtagagcgagggaattttccgagcgatgtttcgtttactgcagatgatgaatttcatgaagtggaacgaaaagtaatcgttctggctcgtcgattagaggagcaagctggactctttcaaaaagtaacgaatgaacgagctcattggaatgaagagatgagacaagaagcgatttctcaagaaaggcatcgtttagcaagggagttgcatgattcagtaagtcagcagcttttcgcaatgtcgatgatgatgtcagcgattaatgaacaaataactgaatttccagatgtgacaaaaaaacaattgcaacttgttgaaaatatggttgtaaatgctcaatcagaaatgagagcattgctccttcatttacgtcctgtacaattggaaggtaagaaactgacagaaggtatagaggaattattaacggaattatcgcgaaaacaacatatgaaaattgaatggcttattgagccaatagaattaaaaaaaggtgtagaagatcatttattccgtattgtgcaagaggcgctatcaaacacgttgcgacacgcgaaggcaaagaaaacagaagtgcgccttcgaaaaattgatcaatatgcgattttaaaaatcattgatgacggcgttgggtttgaagtaggggttaataaggctggttcatatggcctaagatcgatgcaagagcgtgttcatgaaattggtgggacacttaaggtacttagtttcccggccaaaggtacacaaatagaagtaaaagtaccgattatgattgagagagggggagaagtatgataaaagtattgcttgtcgatgatcatgaaatggttcgtatgggtgtatcggcatatttatctacacagccagatattgaagtagtaggggaagctgagaatggaagaaaaggatcacaattagcattgcaattaaggccggatattattttaatggaccttgttatggatgagatggacggtgtcgaagcaacacgcgctattattcaagaatggccagaagcaaaaattgtagttgtaacaagctttttagatgacgaaaaattgtatcctgttattgaggctggggcgaccagctacttattaaaaacatcaagagcaagtgatattgctgatgctgtacgagctacttatgatggagaaacagtattagagccgaaagttaccgggaaaatgatgtcccgtatgcgtcaaaagaaagagcaacctttgcatgatgatttaacggaaagagagtttgagattttgttattaattgcagagggaaaaagtaatcaagagattgcggacgagttatttattgcactgaaaacggtaaagacacatgtgagtaatatattaaataaattgaatgtaagtgaccgtactcaggcggttatttatgcatttaggcatcaattaacgaagtgataaagtgaaactttaatcagtgggaggttgttcctctcccactgattatcagccctcaccaatcgggcttttacgggcagttaatgcgggataaagtgaaactttaattggcggggaattcctcgctgattattggctcgatacaatatagatttggtgttaaaacaattgaatgtttttattgacgataaataatgtaagcgttatcattgaggtgttaacagtacatataaaggggagaatgtatatgttagttcaaactatattcggaatggataagtctaaaaaattaggggattatgtgaacgcattacaagcgctttgtgaacaatataatgttgaaacagataaaattgcgattattgaggcaacagaggaatactatttatttttagtaaagcaagaagagcactatgatgttgtcaaggtagaaacagttgatacgaatattgaatattatacgaaggcttataaaataagcagttttaatcatactgcgtatcaaatgtaaaaaaactcccttttgggagtttttttaggaggcttttacttcgtgagattcggttactaatggaacttttttcgtaccgcttaacttagccattgcaagaccaataagagctcctgctaatgctggtattagccaaccgattccttcattatataaagggataaattcaaaatatggtgtgataaatgaaactgaaataccaccttgttttaatccatcaaatacgctcactacagctgctccaattaaagcacctacataaacagagcgatatccaccgaagtatttatgaagcaatgatagtagtacgagtacaatcgcaattggatacacaacaagtagaattggaacagagattgcgataattttcgttaaacctaagttggcaactagtaatcctaatgcgcaaatgatactcgcgaacgttttgtatgaaaatgtagtcaataatgttgaaaaatattggctgcacgcagatacgagtccaacgcatgtcgttaaacaagcgagtgtaacgataagagataataggagcaaaccgtatggaccgaataattgttgtacgataacagtaagtagctgtccgccattttttgcatatccgagcgagacgctagttgccccaagccagccgagtgcaccgtatacaagtacgagccctgtagaggcaataagccctgcttttgctgtggcgatggcaatggacttacgatcattcacacctttagagcgaattgcatttacaacgataattccgaatgcaagtgctgaaatagtgtccattgttaagtagccttccataaagcctttgaagattggagaagtttgatactcttgcattgctggtcctgattgcccaagtggtgtaaatacacttttaacaaacaataagaaaatagagagtaataaaataggtgttaatacatttccaatacgatcaacaagtttagatggattcaaactcagccaaaatacgatagtaaagaagatgattgtatatacaaatagcactaggctgctagagcggattgtttctggtaagaaagaactaacacccatttcataagcgacatttgcaacacgtgggatgcccatagatggaccgatagcaatgtatacaattactgtaaagaaaattccgaataatggatgaacatgacttgcaagttgctgcattccatttccagatagagaaattgcgataacagttagtagtggtaagccaactcctgttagtaaaaatccaatcattgctggccaaaagttttcacctgcattttggccaagcatgggagggaaaattaaattacctgccccaaaaaataaagaaaatagcataagacccgtgaaaaaaatatgtttttttgatacagtgttcattgtttttcctccttttttaaattcatttgtaagaacacaaaaaactcgtccctaaagaaagggacgagttatatttacccgcgataccaccctaatttacacatgtagaaataaatctatatgtatacggctttgcaacgtacaacatgatacgtgttccttgtaacgggggacggccggtaagaacttactgtaacattcggttctacttctcggagatgattttcggttacgcgctgaacgttggctttcagcaaatcgccaactctctggggaacagttctataacgtactcgttctcgtcaatgaatttttattcaagtattctgacagtattgttgcatgttttttttagaaagtcaatatgttttttgaaagatatatttatatacggaaatatcgaaagtgatattcgttgttgtaaaggaaatgatgaattgtaaaatgggagtggaaatttgcggagaattgtaaattttatagagaaaattgatatttataggagtgaagaagggattgtttgaatttatagagaataatacaacaatccacttgctggaaagaacaaaccaaaagaggtgactgaaatgcttgcgatgggagtattatttggcattattgctataattggttttatgtggttatattattcgcgttcgtttaaacaagcagaagttttactctttcaaaaaggtagtttgttgacaaatcagtctagatatttagtatgtccgaagtgtggaagtgcacaggccagaagtggaggatatcaagagtgttgcaaaattagattatgaaagaaaggaagcctcacattattttgtgaggcttccttccttacaacttcatggcgctccaaattgtccatcgatctctttcaataataggagagacgttttgtaatgcggtctgtatatgttgtagaagttgagaaagttcatcatctgttaactcatatagaatggatcgacctgttcgaggagataaatcttgcaataatgtttctacagaatcatgtatttttcgtatttcccattgtgtttgtgtgggaagtacatgaagagaatgtttttgtaattctgtctgtatagtgttggtttttggacgtctttttgactctatttcaataagttttggaaatagagagaaaaaatatccgcgaatgtgttcgggacttcctggaattgtacaatcttcaattgttcgatcttgtaaaataagtacaccgtttttatttaatatacgagaagcttcacgtaaaaatgtaggaatgtcttgtaaatgatgaataactgcacgcgaaataactatgtcgaatgtttcattagggtatgggatattatgtgcatcaccgtggatgaatgaaatgtttgaaaagttgttacaattttcttttgcagcttgtaatatttcttttgaaaaatcaagtcccacaacattattggctcccataagagcgaattctttcgtataaatcccaccaccacagccgatatcaattatttgcttgttttgtatttctgtaatgttttttaccatttcagcccaagaaatatgagcgtttcttgttgcatatgtgtacttattattttcatcatgaaaattaatggacatgataaagacctcctttcaatgattagtatagcgtatttaataggatgtcacgtttttgttttatgtatgaagattataaggatttcttatcgtaagaggaggattaatttgaaagggaaatatgtattggtgttgttgtttgttatgttactagcagcttgtggtcaagttgaaccgaaaaaagaaacaaaaaaagtagaagagacggtgaatgaagtgaaagaaacaataggggtaaccgttttacaaaaaaaacataaagagaaaaagttgcaggaatcagaagcgaagttagtaatagacattttgaataaagctgagaaacaagaaataacaggaagcttcggtgaacctgaatatgaaatacaaattagtagagatgggaaaaaagaaacttattatgcatggttaaggggagaagatagacgaggatgggtgcaatataagaaagctatgtatatgttgaatgaaaaagatacggaaaagcttttggatatatttccaaatgtctcagaacaaaaagaagatgagatgcaggtaagccctttaacggaagtaacaaaaaaagatttgcagattaccgcgtttcatattaaaacaggcgatcaaaacgtgaattatacggtacggtatacgatttcacaatcactatacaataagttagtgaaggagcaagaatattatttgcaactcaattttccagaaaaagttcaaaaattaattggagcaaaagagagtgaaatgattttaggtgaaaaagtaaaggaagggtataagcaatatgaattacatgctactgttccgataaaaagcgcttcagaatcacaattaaaatcattagaaacatattacgaaagttatgatttgaaaatattaaacagtaaaaaagaaaaaataggtgtgtttcaaaatataattcagattgttaaagattatggtgaaaaaatgaattttcaaagataaagtgagactttaattagcccttacggattggaatgaatataaactcgtcaaatctatatgacctttcctaggaaatgataatagagaggggaaagcacccctctctattactttgcttttgcagatggctcattcattgattttcgtgtaataagaaaagaaatcataagagcggaaaggatgacaagggcaataaatacgtgattgggcaacaaatctaataataatacgtaactaacggtataaaaaataagagttgaagctaaaaacgatagagcacctattataagagattgtaaattcatttttgtacacctccttttatttatatttttggctgaaaatggattatataaacattatttctaacaatagaaaaaaatatgtcataatagagaaaagaacaagctttaatgaatgaatatgattcattaatgagagataaaggagaggaatatgaaaaataataaaaaaggattatggggaattattgttgcgataggtctatttttactgtctaagttaaagtgggtatttgcaatttttaaattagcaaagttttcaacggtatttagtatgtttctatcgcttggcgcatacgcagttctatatggttggaaatttggagtggcgctcatttatttgttgtttgttcatgaaatgggccatttatgggctgcgaaaagaaaggggatcccaacatcgccagcaatctttattccatttatgggggcccttattggaatgaaagagatgccgaaaaatgcgaaagatgaagcttacattgcctatatgggtccgcttttcggacttctgtcatttttaccagcgataccgctttatataatgacgaaagagccattttgggcgcttgttattttgcttggaagtatgattaatttctttaatttaattcccgtttcgccgctagatggtgggcgaattatttcagttgtcagtactaaaatttggggggcaggccttattttattacttggctattcaatttactttaaaagtattttgggaggatttattgttattatcggttgtatggagttatatagagtaataaagagagatgagccgattaaggaattagggcataaaattgatgggatgaaagaatatgttactaggcttgaagaggaattaaaagaaacgggtgctgtacatcggactatatacgtgatgcatcatgagatgaatgcattaagacaaagagaacgggaaaaagagttacaaataggtgaacttcaaaaaatggaagtgttagagtatcttttaccgaagttcgaaccgttagattatgttccatatgaagatgaaaaagatgagtatacaattcacataagggaagcatttgaagcgtcagaaagaaaattaaatgaatggaaaacagaaaaggaacaacaagaaaactattataaagtggatgcgaaaacgaaatggacagtatttgcttgttatatcggattaatggctatactcggttacacagcttatgaaggatatattgttttacaagaacatttgccaacgagaaatgtatagaaaaatattgtcgaaatgataggaagaatttatacaggaattatatttctacgagagaaagttacaagtatagtcatacattgtaatatttttagtagagaaggagttctgtatatgaagaaattgttaagtgtattcgggattattatcgtgatgatcattgcaagctatagtcttatgaaagtgctgttacattatgcgaataagcctgctgaggtaaatacaatagctcaaatagaagatgtgcaagaagagacaaaagtgctaaattttattcgaatgacacatgaaagctataataatttcttaaattacggtaaagcagagaattatacagacggggatttgaatcaatttaagcaatggtttcaacaacaagaatcatcgttaaaaaatatacatacagaaataaagaatgaaaaaataaaacgtgatgtaaatagaagctatgaaattgtaaaaaaaggtgtggaacttcaaaatattgagtatgtagtgtatgcccaccgtgtatatcatgacttggatattatcgtaaataaatatagaggtgaaacgaatatctggggatatacggagtttggcgatgggaaagatataaaagtaattgaacaagctatacaaacaaaataataagctagctagaattctagttagcttattttcttttgtaaatacaatgttcatatattattcacaaaaacaccgtgttaatagtgattaaaatcacaatctgcattataagattcagttaaactaaaaacagttaaggaaatagaggagtgggatacaatgttaagtgcaaaaacaattgaaatcgtaaagtcaacagtaccattattacaagaaaaaggcgttgaaattacaacgagattttacgaaattttattttcggaacatccggagttattgaatattttcaaccatacaaatcagaaaaagggaagacaacaacaagcgttagcgaatgctgtttatgcagctgcaacgtacattgataatttagaagctattattccagttgtaaaacaaattggtcataagcatagaagtttaggtattaaagcagagcattacccgattgtaggtacatgtttactgcgtgccattaaagaggtcgcaggtgcacctgatgaagttttaaacgcatggggagaagcatatggtgtcattgctgatgcattcattagcattgaagcagagatgtatgaagaagctgcacataaagaaggtggatggaaagacttccgcaactttgtgattgttaaaaaagtgaaggaaagcgatgttattacgtcattttatttgaaacctgaagatggagggaaagtttcttcattcatcccaggtcaatatgtaacggttcaaatcaatattgaaggtgagacatatacacataatcgtcaatacagtttatccgatgctcctgggaaagaatattatcgtattagtgtaaaaaaagaaaaaggtgtagatacaccagacggtaaagtgtctaattacttacatgaacatgtaaaagaaggagatgttttaccagtaagtgcaccagcgggagatttcgtgttaaatatggattcaacattaccagttgtactaattagtggtggagtagggattacaccgatgatgagtatgttaaatacgttaattgagcaagattcaaaacgtaatgtatattttgttcatgcagcaataaatagtaatacacatgcaatgaaagaagacgttaaggcagtagaaaatgaatatgaacaagttaaagcatatacttgttattctgcaccgactgaaaaagatttagaaatgaagaactttgataaagaaggtttcattgaaagtgaatggttaaaaactattattccgacaactgaagcagagttttatttctgtggtccagtagcatttatgaagcatataaatgctgcactaactgatttaggtgtgaaacaagagcatattcattatgaatttttcggcccagcaacaagcttacaataagcaaaaaaacgaggtatttattttacctcgttttttatttgttctcgtaataaacggtttactgtttcacgacgtatacctatcagttgaccaatttcggtttgtgttaatatttcatatataggaatgtcacctaaatatagggtgaaccattcttgtaaacgatgaagacgttctttcggagagacggttgtcaattgatcaattcgttgttgcatcattcttaatttagattgcaattgcatagcgatgttagcatacgattcgggatttgcttgaagtctctcgtaccattcactactagtgatcggttccacttctgtttttattaaagcgatagctgtaccgtgatattctttcggtgaaattaaagaatgatgaggtatcgtttcacctggaacgataatgttgaataaaaatggtgttccgtcttcttctagccgaactacttttaataagcctgtttttataaagtataaaggaccgtcctcgccttgacggaatagtacatctcctttgtgtagaatcaatgttagccccccattaatatgtttctatttcttctattttagcgtatatgtatatagacaatatgctatttcaacagcaatttcattgacgaaatgtatgctattacagtagtatactatttagtgtgtaatagtactagcaatgaatacgctgtagggggtttagtatattgttagatgcgatgagaatgacggatatgagaattccggcgaatgctatcattcatgtagaagagatgaaaggtggagtcgttttatccgttgaagtagacggccaaattatttatacgatggcttatgatgaagaaacagatagctatgctgaattatatgatcgaaacgataagagggcgtgccaagtacatgaagacttcatggggtggtcacttcttcattaaaaaagatgtcaatatgacatctttttttattaaatcgatagaatatacaaagaaatgaaatataaggataaaatttgtaataattgattttgcattgttagcactctgtaactgcaagtgaactattttttcgctatcataaagataacagtcgcagttataggagtggtcaacttgaagaaattacatatttcaaattatatgttattatgtgtttgcttaattttatttgttctcctcggaggatttttatattcatgtgtataagaaaaacgcattctaaaaagaatacgttataaaagggaaataatgattaatctagttccaagaataatcaacgtaatacgtaataaattaattacggcgttaccacttagttttgtattaatgtaagccccgatttttccgccaatccatgcacccggaatcaggattaatgcataaatccagctgacatttccaagtgagatgtgagttgcagaacttacaattgctgatagaaatacgatgaacattgaagttgctactgcaatatgtgctgggaatgcaaaaagaagcatcattgctggaacaagtaaggcaccgccaccaattccaaataatccagatataaacccaactataaaggcgataaagatagcaagaaacggtgggaattggtagtgtacagtatttccatcattatctgtaaaagaacgcttaattacagacgtatttgagagggaaagaggttttaatttgtctcgaagcataagtagaattgagacgaatataaggaaaatcccaaagtataaagaaaatgtgtcttggtttaaaaatttatttgcccatgatccgataataccaccagggccgcttccgataaataaaataagtccacttttataatctactcgcttatgcttcatgtaagtaagggtggaagatagtcctgtgaaaacgactgttaccatagaagtccctactgcaagttgtggtgataaactgtgtaatccaattaataacggaacaataataattccgcctccaagcccaactaggctgccgactgttccggcgattagtccgatgaaaagtaacatgatgtattccaaaattgccaactcctctaaataacttatccaccaattattatacacgctttttaaagagaaataggcttgttcacaaaaaagtcgtcttcctagaaaaataaggaagacgacttttgattagaaaacaaaatgtaataggtagtaaaacagagcagctaaagaagctgaaataggaagtgtaataacccatgtaattaacatgcgttttgcagttccccattttacccctttcacacggtgagaagcaccaacccctaaaatagaagaagagataacgtgcgtcgtactaaccggtaagtgaatgaatgttgcaccgaaaataacaagtgatgatgataaatcggcagctacaccatttacaggacgaattttcataatttgtccaccgacagttttaataattttccatccgccgacagaagtaccaagccccattgcgatagcacaagataattgtacccagaacgggatatcgctagaagtatgatagttattagccataagagccatcgtaatgattcccattgctttttgtgcatcattcgtaccgtgtgtgtaggcttgtaatgctgcagtgaaaatctggaatatacggaagttcttattcgtttttgttaagttaaagtttttaaatactactttaaaaatactgtatacggtataaccaataacgaaagcgataatcggtgaaatgattaaagcttcaataattttaataaatcctttaagatttagcgagctaatcccagcggccgcaattgctgcacctgcgattgagccgataattgcatgcgaagaactacttggaataccgtagtaccaagtaattaagttccaagctattgccgcaagcaaagcagctaaaattacaagagaaccattttgtaaggcgaatggatcaacgatatcttttgtaatcgtttttgctacacctgtaaatgtcattgcgcccaaaaagttcataatagccgccataataatggcatgtctaggctttagagctttcgttgaaacagccgttgcaatagcgtttgctgtatcgtgaaatccattgataaagtcaaaagctaaagcgcaaatgactactaaaacggtcagtatcaagagtgtatccatgatcaaactccttacgcgttcttcataataattgtttctaatacgtttgcaacgctttgacagctatcagctacttcttcaagctcttcgtaaatctctttaaattgaataatcttaatcggatctttttcacgagagaataagttcttaatcgcatgacggcgaatatcatcacactgtgattcataatccttaatcttaatcgcatttgtacgaatgtcgactaattttttgttagacattaattcaacagagtttgcaatctcaatcgcacattgattaattgcttctacgaatttaatcatgtattcatctgcttctgtaatagaatacatttcgaacagaccagcactgtgatctaatccgtctaatacatcatccatactcattgcaagttgtaggatgtcctcacgttcaatcggagtgataaacgctttgtttaactccataatgatttcgtgaataaatgagtcaccttttgactcatactctttcatgcgcatagaaaactcttttaaatcgctagcatttttaattttatactccacgaaaaactgcgcgccttcttttaaattttcggaaacattcattaacatttcagaaaatttatctttttttgatttaaagaccattattgttacccccacaaaagtaatatatgtaaaatatattggctaatcaattctaacaaaaaactgtcgttttttaaaacattttatcgaaaagtttacaaaaacttaacataactctcgttgttctattaataatattaatatccaatagtgaatatcttacttgtagaatgtccttttcttgcaaaaagtatgaatgtaaaagaaaagctttacactataggaatgactacgttattataataaatttaaaaggcggtatattcttccttttaaaaagaagagtgtaaataaatgaaggaagtgaacgaatgaaattgaagaacactcattttaaaaaaatgcttgagtggttcaataagaggaagaaacttcgtaattcattaattgtattgggaagtgtattcgttactctatttattgctgtaaatataataatttccattcaagacatatctgaactaaaacaagctgttccacaaccgactttaatttatgatgcaaataatgaggtcgcaactaaattagcttcttcgaaaacagaaggcgttaaaagaaaagatattcctgatattatggttcaggcaattgttgcagtagaagataaggaattttttaaccatcatggtatttattatagtggaattataagtgcggtttttaaaaatattacagcaggagaagttgtagctgggggaagtacaattacacagcagcttgcgaagaatgtatttctgacacaagatcgtacattttctcgtaaaataaaggaatactttttaacaaaaaaaatagaacgtacttatacaaaagatgaaattattgaaatgtatatgaatcaaatttattttggggaaggtgcttgggggataaagagggcagctaaatcttattttgataaagaggtaaaagatttatcaatttcagaagctgcaacgattgcaggcttaattaaagcaccatctgcatattcaccttataaaaactttaacaagtcaattgaaagacgtaatgtcgtattaagcttaatgaaagagcaagggtatatttctgacgaacagtataataaagaaaaagagagcggtcttgtattaaaacgtggtgtggatgataaatacaagggaaaatattctcaatatgtagactatattgttagagaagcgatggacaaatacgaattaacacaaaatgaaattttagcaggtggttatcgtatttatactgagcttgatccgaaaaaacaacaagctgtagaagatgttgtgaataatgatagttatttcaaagatagtggctcagatcaacttatgcaaacaggtgtagtccttataaatcccaaaacaggcggtgttccagctttagttgggggtagaggaccatatcagtttttacaatttaatcatgctacgcaattaaaaagacagccaggttcaacattaaagcctctagctgtatatgtacccgctttagaacaagggtatgaagtatacgatatattaaaggatgaaccatttaatattaaagaatataaaccacaaaatagcgatcatacttttcacggtgatgtgacaatgtatgaagctgtggcaaagtcgtacaatgtttcggctgtttggctattggaacagattggattagataaaggattgaaatctttagagcgatttggtattccattagtgccagaagatcgtacgtatccaatcgctttaggcggtatgcatgtaggaacatccccatttgtaatggctcaagcgtatagtacatttgcaaatgatggtgttcaagtggaagctcatgcgattagagagatacaaaatgcggaaggtgaaacgattggaaagtggtataagaaagagacacgagtgacaagcgagaaaatttctcaaaagatgacatatttattaaaaggcgttgtcgaaaagggaacgggtgaaaaggcgaaagttaataatgttgatacggccggtaagacaggaactactcaaattgtaaatggcccaagcaccggcgcaaaggattcatggtttgttggatacacaccagatttggtaggtgcgatttgggtaggatatgataaaacagatagcgatcattatgttccgggtggtagtcaaattacgacgacaatgttccgggatattatgaaaaaagcgaacgcaaatccagctcaaaaagcatttcagttatcgctcatatctgaggctgattataaaaaacaattgactacaatagaagaggaaaaacgaagaaaagaagaagagaagagaaggaaagaagaggaacaacaaagaaaaaaagagcaacaagagtggattgataaagtgaaagaatggattccttcattttggtaaaagaaagaggcgaataatgaaattcgcctcttttttgtatgaaaaacaaaatgaaactttaaacgattgaaattatcccttctccgtactagttactactcgttaagtataatgttcgtattgccaaaggattgagaatcgtatgtgacaattatttttcctttactaataggttcgtaaggtaattcttcttcgtaattaccattattttcattgtggatagaaagtgtaatttcatcgatttttttatttgtatactgatctttaatcgtttcagcaatttgaagtaacgcttcggaactagaagctttcgtaataagcattcccgttataactttcttttcattttttgttgcattggaataagggatgttgctttgtttcgtatacaaaattttgtatggaacagtttttctatctgcttttgaaatagtggaatattttagagttaaaaaaaatcctacacataaaataatgcataccataagagcaatccaaatgcgtatcggtgacataactctcatttttcatccctctttcatatctttgacttcattatttatcatacaaaatgaggattaagatagagtaaatttgaggtaaagaaacgtaaagaaggagcacttatcctcccaaacaagtgctcctttttattaaaagagagatttaatagacaatcaaaatcacatctattacttataaatgtgcttagtcctcccaaaatattttcggaaattgtggttagtaaattcggaagacagatagtgtcgcagttgtatcgcccgcaggtccttgagcgccttgaggtccttgagcgccttgaggcccttgagcaccagtagtccccgtagttcctccgcctaggcaaccaaatccatattgaactagaatagcttgaccaagagcttgaagaagtctaacaaattctgtaagttctgacttagggatgttaatatggttacatgctcttacttcgcaacaatcattaccataaaatacttttcctttatttttattgttcatcttttcattcttttctttcatagaatcatcagtcattactatatattaaaatgaaatttatactaaattcgtgatggacaaattaccatttctaaaaaaaataagaaattggcccacctacgaaagaaataagtaagatatagagaaaggtttatataatgtaaagaagaaaagtgcaacataaaaaactacatgctaattgttgggagtgtttaacaattggcatgtagttcgtggattagtcctttatttacattgatttaatttttcaagggttgttttaggtaagattggaattgaaatagtgaaagttgtaccatcttcattactagtcatttttaatgtgccgttatgattttggatgattttttttgttactgacaagcctagtcctgttcccgaatccttcgttgagaagaatggatcaaagatatattcttgaatagctggaggaataccaattccattatctgtgaaagtaatccgaatgaagttattaaggcgataactagtaatttgaatagaaagaggtttgtcgccttgagcatcgacggcattttgaaatagatttaaaaacacttgaacaagttcatgtcgatcaatattgactaaaatatcatctaattcattagagaagttataatcaattgaaatattatgcaaggaaacttcactagctagtaactgttgaatatagtcacgtaaaaatgtattgatgggaaacggttctcttgtaaattcccgtgtttttgaaatggctaaaaattttgtaataatattatttgcacgatctaattcagggataagcaagtttttaaataactctttatttgatggagaaatgctttcttgtaaaaattgtaagtatccgcgtactgttgtaagaggatttcgtacttcgtgtgcaattccagctgcgattcgccctgctaacgaaaacttctctgcatcacgttctgtatttaaataatgaaagacactaataactctaaaaatctccccgttataatcgcgaataattcggttatttataatgccatagtttttgtctaaaacttcttcattatatatttctgttcccgtttttaatgtttcaattgctttaattttttcttccggcaagtttagtaattgttgaatcggttttccgataatatgatttcgtattataccgaaatcatctgcagcaacttgattacataaagtaatattccctttactatcgataaaggttacatgatgtgaaaaggcatcaaaaatatgtacaaagtgtttttcaagttgttcaaataaaaataatgaatcacaagtaagttgaaaatgagcctctttattctcttttggtatttcttgaatggaatgagtcgttctagttttctttattcgtaaaccaatatgtggatttttgtatgtgaaatgatgtggtaattgattcacaagttcttcataaaaacgtactttattttctagttcttcaattcgtttttcatgagatacagtagcatcgtttggaagcataaataaataacccctcattttaaaaattcttccatatagtatatcatatttttataaggatactcttaaagaaaaggctacatgatgcaaagtgtttggaaagtgaattgaagatgaagttaaaagggaggggtatatgtgctgtttattggagtgacaggatggggagatcatgattctttatacataaatccctatgaaaatagaaataaattacgaacatatagcgagtattttcctattgtggaagtggatagttcattttacgcgatgcaacctgcacgaaattatataaaatgggcaatggaaacgccgaaagatttttcttttgtcgtaaaagcgtatcaaggaatgacgggacatatgaaaggtgaaattcctttttctacgttcgatgagatgtttgatgtgtataaacagtctattcttcctttaatagaagctgataaattaaaaacaattttatttcaatatccaccatggtttgattgcaaaaagaaaaatgtagattttcttcgatatacgaaagaaaaaatggaaggtttaccatgtgcaatagaatttcgaaatcaaacatggttttatccagaaatgagagataagacgttacagtttctagaacaggagaaatggattcatacaatttgtgatgaaccacaggctgggataggttctgtgccactcgtgttagaggttacgaattcagacatggcattaatacgttttcacggtcgaaatgttcatggttggcttgataaaggggaaaattggagagcggttcgctgtttatatcgctacaacaataaagaactggaagaatgggttgaacgactagagcaattaaaaaagaaaacaaaggatatatacgtactgtttaacaacaattcaggtggggatgcagcagataatgcgaaacagcttatgaaaatgatgaatattacatatggtgagccgaagccggagcaattaaatttttttgaatgataataaacaagaaaggcactgtacaaacagggggaatgtacagtgcctttctatatgaaaaagaggggtaacaatgttactgagcgtttggttgattcatcaattgttggcttcacaataaatgataatggttatcattatcattgtcaatggtttttctaaaaatatataaaaaactttatatattttaaatagagataaaaaaagaacagcgattaatgctgttcttttccattgacgaattgttgtaaatcaaaaggagttatcgcttggataaattcttttgagataagtgtttgaacgagagtgctctcagagatagaagcacctgtcttcttttcataagcttgttttaataaatcaagtttttcagccgtttcttttggtaattcaattgtaagtgtgttcataatttctcccccttattattagagtaccactacagtataggagagacaagaaaagagaatacgaaatataaaaaaggttaccaaattttaaaatggtaaccttttttatgtataagagttattaagcaataccgatatactttaaagtttttgatggagtactgtgatcaaagaagtgttgtaaaaacgcaatatcaacacctgatttgtatgcacaataaccccaagtttttcgaagtgtatgtgagctaatcccttctaatccaacttcttttgcggctttgtttaaaatgtaccatgcatgttgtctcgtaatagattttgttcctttttgagattttaacaatggttcattacgtttccaagttttacgttctttcatgtagtcttcgattgcgtgctgtaagtcttcatttacagcaaaccatttatgtttcttcactttttcattgtaaaataaaatggaatggcgaacattttcattttcatcgattacatcactaacttttaattgtaagatttcacttacttttaagccagaatttacagctaatacgaataataagccatcacgtttcgaagattgtaaaagtatatttttgatagtttctaattgtttttcattttgaataggttgtcctgcttgtttcatttcacgcactctcctcttttatatgtgtaaaggaaaggattaacttgtttcttactataaagggagagtgtgaatttcatgtgaactcctagtgaaattaagacaaattatttgacttcttttactttttgtaaattgaaatagaatacaacactgttagtcgtattatacacaccatactcggcatgatggaggtctaagatgttttttacaatagataatccgagaccggtacctccggtgtgacggctacgtgatgcatctagacgatagaagcgatcccaaattttttcaagactttcttcagggatagggtttcctgtattctcgatttcgacttttacggtatcttctgcttctataatggagacttgtattttttctccctctggcgtataacggattgcattacttagtaagttcacaactacttgttcaatgcgactgcgatttgctttaacaagtatagaagggtctgcatcgatgttcacttgtaaatgtttttcttccatgctaaataataattttgtgtagacttgttgcgttaattcaccgattgagaacgtcgtcatatctagtttgtaagtaccagattccaactttgctaattctaacatttcaacaatcagcctgttcatattttctgtttcttctaaaataacatcagtataatacgaagtatccttactaacaccatctttaattccttctgcaaaacttctaattacacttagcggtgtttttaattcgtgtgatacgccagaaatgaattcttttcttgttttttctaattgacgttcacgttcaatatcttgttgtaactttgtattagcaacatttaatcgatcgattcgatcttttaaatttacagataatgtattgatactgccagaaagcccgccaatttcatcgtcagctgtaacaggtaatttctcgctgaaatcaaaattagccattttttttgtaacacgatttattttaattaatggcttaacaatgatttttgagtagtagaaggataacaaaataattacgagaaacacgatgattaaggcatagacataataatcttttaaaacgagcatcgcttcattaacaggctgcaaagatgctatcgcaaaagcgtattctgtaatccttccattttctataatcggttttacaaagatactattttttatattttctccgccatctaatatgaaagtacttaattggttcgagttagaagttccctctctaatcatatctgcaaaatattgaacggcttgtaatgtttcaatatcatttgcaagacgaacctcagctttggatgggagctgtaacttagttataacacctgtaaagacgattcgagttgtagatttgtatcggcttgcaagtctgttcttagaagggttaccattaattgactgaaaatccgaatagaaatgttcgttctgccattgattataattcgtccctaatttttgtggtgtgattatattattctcttgtacgactccatcaacattgattattacatctttttttaaacctaaattttcgaatttattatattcttctggtgttaaaagattattgagtggaatggaatactgtttattattgttgggattaaatacatcgatatagtaattgttatcacttttaataataccgttagagtccaaaaactgcatatcggcatttgttttatcatgaaattcttgttttagttttctaacctgctcataatttttatcacttttatcataattatctacgaatttttcaaaagcagtttggactgtttttactttcttattaatataaaatttctctaaaaatagagattgtcctaggaaaaaaagtaggaatatgattgtaaataaagtggatgttaataaaaatagtttaaagacgatacttctgtttttcactacgtcacctcttatgagaaatactgtaaatgatttctttatcccgctttaacgggcaataagactcccacttcaaaattcggcgaatacaagggagttaagtgggaaaacaattgcccgtaaaatccgattggttcaactaataatcagtgggggatggaaaaaacctccactgattaaagtttcactttattataacaaacgttacaagaaagtagaggggagaaatctgtctctttataaagtagttatttataaaaagtcacataaaaagaactcgccagacgtatgacaagttctttagtgtattattgttgaattgctgcatctaaagcgatttcaatcatttcgttaaatgtagtttgacgctcttcagatgttgtttcttcgccagtgaagatgtgatcgctaactgttaatacagataatgcatttacaccgtatttcgctgctaatgtgtaaagagcagttgtttccatttctactgctaatacaccgtaatctccaagttttttaaccatgtccatgctttcacgataaaacacatctgctgttaaaacgttaccgacacgaacgtgtaatcctttttcagttccagcatcataagctttctttaaaaggtcaaagtttgcagctggtgcaaaatcaaatcctgggaatgttaaacggttcatattagaatcagtacaagccgtcattgcgataataacatcacgaacttttacatctttttgaattgcaccgcaagttccaacgcgaattaaatttttaactccgtagctttggattaattcgtttacataaatagaaatagaaggaacacccatacctgtaccttgaacagatacacgttttcctttataagttccagtaaaacctaacataccacgcacattattatagcaagtaacgtcctctagaaatgtttcagcgatatattttgcacgtaatggatcaccaggtaatagaatagattcagcgatttcgccttgttttgcttcgatatgtacactcataaaaaagtcctccttataatgtattgatagaaatcaatatcatttgcattatacactacgaatcctttcaattaaaatctttttattatttgtaatatgtgcaaaataggaggatttcataaatcataatctagaatatatatcttaagaagttttgtatgaatagagacaataaaaatggtaggtgatgttttgaaaaatcttgtcatcgggcttattgcgttagtacttattgtggcaggaggattttacataaaaaaatatcaagaaaacgaagagactgtaggagatgttcaggaagtaaagtgggatgtttcaaatggaaagggaaatgagaaagtagatattgtatttcagttgttaaacaacaagaataatgaaattcgtggtgtaaatgatcaaatgcgggcagtgattgtagatggacagttaaaaaacatacaacaaattaaacccacatttgcagggaacgggtcatataagttatcttccaaaatagcgaaagacgaagaatatacaatatttttatacgaagataaaaataagtccgtagagtcattcgctaggaagaattttggtagaacgaaagaggagaacaataagaaaaaagtgaaatttccaatcgacagtgtacttacaaaaaaaataggagagtatgaagtttctcttttatttggcgcattacatccgaatgaaccagttacgttaacatttcagtttcaagcgaaaaagggtgaaaaattgaaattgcattcagagagaggagaagtagagtcactctatatagtggatgaaacgaaggagaattttttatacgctatgcctgtagatacggatgaacaattacaataccgaattacatttcctgccgagggcacgtataaaatgtgggggaatttctatataaatggtaagaagtatgaaaaagaatttattgtacaagttcaaaaaagaaaaaacagctaagaatttagctgttttttctttttcctattaattttgttacagagagcattgtaattggtaaagaatgattcttcctaaatgctaaatatttaccgctccatgctggtttatatttttctttaaaatgtcgtaatccgctgaaactatacgtataacgaacgttattaaagattgcagcagccactcgttcagaccagaaagactgtgtggataaaccaacatttgaaagtggtgccataccgatattaaaggagtggtattcattttcttttgcccactggaataagtggatgaaaattgcgtccataatgccgctaggcgcatctggataatatcgcattaaatcgacagataatgatccgttttgatatacaggcatgaatgttgtgaatgcaatgatttttccatccgaatcagataatgttgcgataggagcgcgactaatatattcacgatcgaagtatccgagtgaaaaacctttctctttttttccaccaagccatgcatctgaaacttttcttaactcttcatataattcgtcggagaaaggtggctcatgaatagagaatgtatagccttctctttcaaaacggttgaaagtagctcgcatgccagcgcgtttctttcctgttattgtaaaggtatttaaatcaacaacagcttcttcaccaagcttaaagaagttataaccaaaatcgtggtataaactcatccatttactttcaatttgatagaatacacaaatgtatccaaatcgatcagcctcagctaaaaactcttgcaatacagtacgataggaggaagggtccccaattggatcacctagtacaataagtcgttttccagttattgagaagagaatgagtgcttttccatcactactgaaaaagaactgtttatctcctaaaaaacctaaatgactaagtacatttccaccatgttcatctaagaagttttgtaatcgtttatcattagctggttgcccgggaaattcatttcgataacgatttgcaatgagtgaaccaattagtaaaaaagtaggaacaaaaaaggcagctgctaatgcacttcgtttcacttgtgtaatattacgaacgacaaaatcaggtttgaaagcttcttttgcacctgcaaataaaatacctaagtttttatataaatataacgttacaagtaggaatataaaaacttttacgatatcggaaagtgagacttccattttctcacgtacaaaccttttacgaagcatatacaatacagcgagtacgattaataaaataaaagtttcttcaacatcaattccttttagtgtgttaaaaatagccgctccgattaaagaaacaatcgtcatataataagaacgttttgttccgtaatatatcccccgcgaaagaatgaggaggagaataccgaatgttagcgataagctaaaagaaaattgaataagatgttttggagctagaatatgtaaggcgtgtgcccgatttatacttgtcggtagaatggttgataaaataaccattaagccagcaaatactgttaaagcagcagatgcccaagaacctaactttcctagaaagtcacgctgcaaagtccatataacaccagttgtctctaatgcaggcgcaataaaaggtttatcttcaaactttttaatggctactcctgtcatttcaaaagctgcaaaaatgagaccaaggcagaagggcaagatgtaatagacgagacgatataataacatagcagggagtaaaacacctgtatcgatgccgtattgcccaagcccagttaagaagacaagatcaaatgatccaaggccaccaggaacaagactaacgacaccagctaaagcagcaataacatatacgcctaaaaacttttggaattcgatttcaatgccaaataatagtaatatgacgtacataacaataccagcagatacccattcgactaatgaaactaatgagtataaaacagttgggtttttctcctcttcttcttcttgttcctctgtttgcgtcgcttttctattttttaatttagaaaatccgatatatatagggacgaaaagagcgaagaagataagaacaggccatagccatggtttttcatgcaaaataaatctcgtgtctaatattccgatgagaccaagaaatgaaagaatggctaatccattaataaaggcagttgtcatccaagcgatacttttaataagttttccattttcttttatatatggacgataaagcattgtgcgtacgccggctccaacaagaccaccaaacccgataaatccatttaaagtattagcaatccacgagatacggaaaatcttttggacagggatatcagcttttaagtaacgaagcataacatagtcataaaagaacattgttgatacagcgaatgcaccaagtgtaattgctaaaaagactcctccagttggaatgtttttaattgtatcaatcgcttctaaaaaagaaatgcccgctaattctttttttgcttgaaagaatacaattgttaatacaacaaatgggaagacaattttcccgatttgtaagaaacgtttccatgaaaacgacataaatacaactctccttgtataagaaaactgagacaataatattattatgacaaacttcaagaaaaataaaaaggtaaattcctgtataggcgagctattttttatataggtatatttaaaagaatattttgtttatcagaaaattaagttagaataagatgaaagaaggaggaggggagtatatgattataaaaggttatgtaggatatgagttagaaaaagcgaaacctaatacatcagaagatttttttaacagatctgaagtgacatatatattaaatggtaaagagaaaactttttcggttttatacgttcgatattttgaagaagttttacaagaaattactccttttgaaggaaatccagtgtataaagtagaagaacaaaacatatatttgcgtgatattgtagcgatatgttgtttagtgaaagataaggagcttcgtgcgcaaaaacgtttgtatttaaataatatggaagaatttcaacaatattttgatgagggaacggtgtcgaaagtacaagaaatattggctgaattacataaaaataaaagagtagaaatagcgtgaaatggcaaaggagagagaaaaatgtctaatttgatggttgaaaatcaaacagaacaagtttctatatttttagaagatgctattaatttgataaccaattatgtaaattatcatacgttaccttctttattagaggaaacaccagcagggaatgagcaatattataaaggggtattagcatcaatgagacgacttctcgttttttgcgaagaaggacaggatgcatgttttgttttgttgaatagccagccatttcgaaaaacagcagctgaaaaaattttatataagatttaccatcaagtaattgcagagtttttttcaccgaagagtgatcattggtatgaaaatagtcggtctgcatatacagggaaaaattctatcgtttttcaacaaacaccacctgcatctttggagcaagtgatgaagagtttagaaggtaaatttcaattgatgcgtgaagaactagaatattatgagacggattatcagacaaagatgttacacaaatattgattgaggaaaagaagctaaggtgacttagcttcttttccttttgtacagttatataagggattttcattgaatatagttaagtggatagcattagggaggtgcaacatgaatcagcaaggtgtatttacagattactttcatgaagtagaaaattggtgtgaaagtgttcttcacgtattagatagccgcgcaatggaagtgtatgatgtccatatgcttgcttataaaattcagacgttattagagcgtatgaaagagcatgagtatgaaacagatgcagagtttatgtatgaaataagcgatgatgtagaacacattcagcatcacttgcaggaagtatttatgcaagaagaagaggaatatgaattatatgaaagaggggatagtgaacgagctgtcccaattggaggacatacactcccgccattaccttatccgtataatgcattagaaccgtatatttctaaagaaattatgatgttacatcatgataaacatcatcggagttacgtggaagggttaaataaagcagagaagatgatggaagaagcgagaaaaacaaataaatttgatttaattaagcattgggaaagggaagcggcttttcatgggtcaggtcattacttacacacgatattttggaataacatgaaaaaagacggtggtggaagtccaagaggagctttttcacaacaaattgaacaagattttgggagctttttacgtttccaaaaacattttacagaagcggcctctaaagtagaaggttcaggctgggcaattctcgtttgggtaccccggtctggaaggttagaaattttgcaaagtacacttcatcaattatttacacaatgggatacgataccgctccttgtactagatgtctgggaacatgcgtattatttacaataccaaaatcgaaaagatgaatatattaaaaactggtggaatgttgtaaattggcctgatgtagaaaaaaggtttgaaactgcgaaacaaattgaatggacaccatattagacgcaaattctctgcgtcttttttaatggaagtagaaggaagatttcgttcatattttaaaaggccaagcatacacttgtacaaaaagtgccaaaaggacgtggggggaaatatgagacgaatttgtgtaatcattacgcttcttatgatgtatgcaagcgttatgccgattcctacatatgcaaagatgaacagcaatgtcagtgctcgaaatgctgtattaatggagcaacagtctggtcgtgtattatacggaaaagcagaacatgagcctcaaaaaattgctagtataacaaaaattatgaccgctttattagctgctgaatcagggaagatgaaagaaatggtatcagttagtaatgaagcggtgagggtggaaggatcggcaatctatttaaagcctggacaaaaagtgaagttagaagatttagtatacggactcatgcttagatctggtaatgacgcagcgcaagtaattgctgaaagtgtgggtgggagtatagatggattcgtatatttaatgaatcaaaaagcgaaagaaattggaatgaaagatacgcacttctcaaaccctcatggcttagatggagatggatcacattattcgtctgcttacgatatggcattattaacgaaatatgcaatgggaaacgagacatttaagaaaatctttggaaccaaaacatataaatcagattcttgggattacccgtggaaaaataaacataagctggtaacgtcttattatgaatttgcaacaggaggaaaaacaggctttacgaagaaagctgggcgaacgcttgtgacaacggcatcaaaagatggactagatttaattgtcgtaactttgagtgcctctagtgattgggatgatcatatgaatttgtttgataaaggttttgaacgtttcaaacaaacgaaagttttaggacaaggagcaattgctgaaataaatgaaaagaagtatgccaaccatgtttatacgaaaaatagtttttcggtaccgttaactgaagaagaaaaaaagaacgtagtattaaaagttgaactccataaaagtataaaacttacggatggagtaaaggttgggaagacagacatttatgttggtaatgaaaaagttggagaacggaatttattttatagtaaacggaagttagtagctacaacgggactttactggaataatgtgaaagaaattttttcttacatgataggtgttgggaacgatggttaatctcgtatgggtagcgatggctgtcattgggattgtatacgccatgataaatggcacgatggaagaagtgaataaagctgtatttgacggagcaaaagatgcggtaacgatttgtataggacttattagtgttttagtattttggctcggtttaatgaaaattgcagaggaagccggattgttaaaaaaattagttacactttttatgccgatagtaaaaaggttgtttccagaaataccaaaggatcatccgtccatgggatttattctatcaaatatgatggcaaacttttttggtctaggtaatgcagcaacccctcttggtattaaagcgatggaacaactgaaagagttaaatggaggacaggattcggcgagccgttctatggtgacgtttctagcattaaatacatcagccattacattaattcctacgacagtcatttccattcgaatgacgtatgaatcagcgaatcctactgaaattgttggggtaacatttattgcacaagtactttctatgattggagcaatttggattgaccgctatttttaccgaagaaggagtagaaaggggcggaaaaaatgagtattgtaaatacaatttccttatgggtaattccttgtgtaattggttttatccttttatatggcacaataaagaaagtaccgacgtatgaatcgttcgttgagggaggaaaagaagggattcaaattgcaatttccatcttaccgtttatggttggaatgcttgtgtctatttctatattccggtcttcaggtgcgttagatgcaatgatatcggtaatgaagccaatgttagatttgatccatgttccagcagaaattgttccactagcacttatacgccctatttcaggctctgctggtttaagtattacgaccgatttaattgccacatatgggccagattcgtttattgggagattggcttctacgatgcaggggagcacagatacgactttctatattttaactgtatattttggagcggtcgggattagaaaaatgggtgatgcactaaaagtaggactttttgcagatttaatcgggattatatgctcaattgtgttcgtttctttattgtttcagtaatactattcattttttacgctatttcgcttataatacgtatacgaccactattaaggtgtagcttaatagtggtttttttatgtggtatttttgacaaaatgatgaacttttattgtgagaaatatgaaaaatatggacaataataaagggtaaaaacatgatttgacctttatatgtttattatcatcgctatgttgtttaagtaagatgaagcgaatagccgtaaagcgtatgcggttgccaagtctttctaatgtaaggtaagataaattcgaggtgaaaaaaagaaatggaacgattacaaaaagtgattgcgcaagcaggtattgcatcgagaagaaaggctgaggaattaattcagcaaggaaaagtgaaagttaatgggaaaatagtgaaagagttagggacaaaagtaactcctcaagataaagtagaagtaaataacatccctcttgaaaaagaagaacctgtttattttttactatataaaccaactggcgtaatttcaagtgtatcagacgataaaggaagaagtgttgtaacggactttttcccggaaattacacaacgtttattcccaatcggacgcttagattatgatacgtctggcgtattattaatgacaaacgatggggacttcgcaaacgtattaatgcatcctagatataaagttgaaaaaacatatgttgcaaaaataaaagggccattaacaggtgagaaaattcgcatgttagaacgcggtgttacgttagaagacggtaaaacagcaccagcacgtgtgaaaattatttcttgggacaagcgtaaagagatggctattgtacaattaacaattcatgaaggacgtaatcgtcaagtacgtcgtatgtttgaagcgttagactgtaaagtagtgaaattaaaacgtgaacgttatgctttcttagaagtaggaagcctgcgacctggtgatgcgagagaattgacaccacatgaggtgaaacaattacgcgcgcttgcttctacaaagccaagataagctatagagttaaaaattcaccagtggagtgctctgctggtgatttattcaatacaacatttacagaagataatacataacatttatcgaggagaggagaagtaatatgaagaaaaatcgcttattatttcgcgttattattctactcattttatgtggtgctgtaggatttaccctttatcaaggattctttgctaataaagagaaaatgcaaatcggaaaagaagcacctaactttgttgtgacggatttagaagggaagaaaattgaactaaaagatttaaagggaaaaggtgtatttttaaacttttggggcacgtggtgtaaaccttgtgaaaaagaaatgccttatatgaatgaattatatccaaagtataaagaaaaaggtgttgaaatcatagcgttagatgcagatgaaacggatattgcagtaaagaactttgtgaaccagtatggtttgaaattcccagttgccattgataaaggacaaaagattataggaacatatggagtaggtccattaccgacaagctttttgattgataaagatggaaaagtagtggagcaaattataggtgaacaaacgaaagaacagttagaagggtatttaaagaaaattactccgtaataaagaaagcctttacataaggggtgcgtgtctatagtgcctctggtttaaaaattctgagtattgcggtaacttgaggttagaatatacaatagtacatatagatacaggggcggtgagagtgttgaaagaaattaaatgtgaatgtggacatgttaatccgataggaaccgttttttgtgaagcttgcgggaaaccatttgaaagcaatgaaaatacaaaactattggatatgcgctatgaggggagtgcacggagatctctcacgcagacaaaaacgataatcgataaaatttggagctttttctcttctgtaaaagtgggtgtatggctaatcgtaataactttagctgcatcagcgataggaactatttttccgcaagaaatgtacataactccagggattgcaccagctgaatattataaacaagaatacggatttttaggacaattatactatcaattagggtttaataatttatacggttcatggtggtatatgattttgattgcttctatcggtatttcacttgtgatatgtagtttagaccgtgttattccactttataaagctttaaaaaagcaaggcgtaaaaagacatcctagctttttaaagagacagagattatatgggactggtacaccgcaagaaggtgacctggaaagagtgcaaaagaatttaaagaaaagaaactataacgtgaaagtggaagacggaaacgttttagcagaaaagggacgcttctcgcgttggggtccatatgtaaatcatatcggtcttattatctttttattcggtgcgatgcttcgttttttaccgagtatgtacgtagacgaagcactttggttacgtgacggtgaaacgaaagagataccagggacggatggacaatactacttaaaaaacgagaaatttataaaagaagtttatgataaaagtaaggacaaggaagtttttgatgaagcgattaatcgtgtaggcgataaaatgattgcgaaaaacttccaaacgaatgccgtattatataaagcagtaggagaaaatatagcaggacaaaaaccgaaattagaaaaagtaaaagaagcggaaattcgagtgaatgaaccactgaaatttgatcaatttgcagtgtatcaagtggattataaagaaagtgaatttaaaagtatgtcctttaacttacaaaataaagaaaataatcaaaagtggggaccgattaaagtagatttaacgaatcctaaggaaaaatatgatttaggaactggttattctctagaactattaagctattttcctgatttttattttgatgagaatggaaaaccaaatacgaaaacgaaattaccaaacaatcctgcatttgtatttaaaatgtttacacctgaaacaccagatggcgaagtgagttttgttggtattcagcaaaatatagaaccagatggaaacaacaaatataaaatgtcgtttgcaggtgttgaaatgcaaaatgcaacagcacttactgtaagaaaagatttaacgctttggattctcggcattggaggatttatatttatggttggtgtcattcaaggtatgtattggaatcatcgccgtatttggatacaacgtgttaatgatgaatggtggattgcagggcatacaaataaaaattggttcggtttaaagaaagatattgaaagagtaatagaaggtacaacaattccacagccaaatgataaagtaattgataaaaaaattagttaaggtggggaaacgatatggtgcaaataagtagtaactttctctttaccgcatttattttatatttaattgcgactctattttttggaggagccattaaagaaaagggtcataaatgggcaaatgtaggaataacgattacaattttagggtttatagcacaaacagtatattttgttacaaggtggattgcatcagggcatgcgccagttagtaacttttttgaattcggtacatttttcggcatgatgcttgtaggagcatttattgtcatgtattttatgtaccgtgtaagcataatcggactatttgcattaccagttgcgcttttattaattgcctatgcaagtatgtttccgagggaaatatctccgcttattccatctttaaaaagtaattggttacatattcacgtgacgacggcagcagcaggacaagccattttagcgattagttttattacaggcgttatgtatttattgaaaaatgtagatcaatcgacgagaagtaaacgtacattttggctagagacggtagtatttacacttgtttgtacagttggatttattggagtaacaacggtattttctagtatgaaatatgaagcgaagtttcaatggattgataaaaatgaacaacaactggaaatgaagtacaatcttccggctttagttggaccgcatgaagggaagttactgacagaaaataaattagaaccggcagttgaagttccagcaattgtaaatgcaaaaaaattaaatactgttatttggtcagtgttagttggaacattactgtatattgtattaagactcgttttacggaagcgagtatcggcggcacttcagccgttagtaaagaatacgaatagtgatttactagatgaaatcggatatcgatctattgcaattggattcccagttttcacattaggtgcattaatttttgcgatgatttgggctcaaatagcgtggacgcgcttttggggctgggatccgaaagaggtttgggcacttataacgtggctcttttatgctgcagtactacatttacgattatctaaagggtggcatggagagaaatcagcttggcttgcagtaattggttttgcaatcattatgtttaactttattgtagtaaacttaattattgccggtttacattcatatgcatagagaaataaaataggagagtgcatgtcactttcctattttatttttgtcaacttttcttcttttttgagaaaaacatgacaaagtagcggttgattttgtaaaatgatgtcgaggacattatatacagttcaaaaaaaatacatagttttggaaaaaaattgaacaaaatttattattcttgtgaagcataatatgggaagtgaaacatttagaagattgcttaaataaacgagaatagcgcaacataatagttaaagaagggtaggtgtgaaccgctgaggtgagagtacgcagcgggtagagatggaaaatgaatcaagaattttaattgtagatgatgaggatcgtattcgtcgtttattgaaaatgtacttagaaagagaacaatatacgattgaagaagcagataatggtgatacagctttagaaatggcgttgcaaaatgattacgatttaatcttattagatcttatgatgcctggtaaagatggcattgaagtatgtaaaggggttcgtgagaagaaagcgacaccaattattatgctgacagcaaaaggtgaagaagtaaatagagtacaaggatttgaagttggaacagatgattatattgtaaagccgtttagtccacgtgaggtcgtgctacgtgtgaaagcggtattacgtcgtgctgtaccaacaacattctttacacaagatacaacgacaaaagatgttactgtattccctcacttaacaattgataacgatgcacaccgtgttactgcagatggcaatgaagtaaacttaacgccgaaagaatatgagttactattatttttagcgaaagctcctgataaagtattcgatcgtgagcagctgttaaaagaagtatggcaatatgaattcttcggagatttacgtacagttgatacacatgtaaagcgtttacgtgagaagttaagcaaaaaatcaccagatgcagcgaaaatgattgttactgtttggggtgtaggttacaaatttgaggttgtgaacgactgatgctttggagaagtgtagtagggaagttatggatgaccatattacttctcgtttcgtttgttcttggatttgttgcgattttactttcacaattttttagaacgtattatgttgatatgagtgaaaatagacttcaaaaagtcgcaacaagtgttacggaattaattgaagaaggtgccgatgtaaaaacgattgagaacatcgcgtacaaattctctgatccactttcaaggattattattgtagaagatggcaaggaaatctcttcttcaccgaaacaagaagggttagtcacccttacaatggataatttaaaagaagataaagaattagccgctgtttttacggacaaaaaagaaattaagaacaacattagaaaagcttctgatagtagaaagaataaaagcactgaaaatgatattgtgatcgttgggaaaccagtgcaatcaaaaaatcaaagcgcagtgttcgtatatgaatctttacaagtgccaataaaagatatggagagaacgactgatttcattttcttagccgctgggattgcgattatattaacaactttctttgcgttcttcttatctactcggattacagcaccgcttcgtaaaatgcgtgaggttgcttttgaagtgtcacgtgggaaatttgatgcgaaggctcctatggtatctcaggacgaaattggtgagctggcaacggccttaaatcaaatgggtaaacagttgaagtttaatatgaatgctttgcagcaagaaaaagaacagttagctagtattttgagtagtatggcagatggagttattacgttaaatcaagaaggtgaagtcgtagttattaatccaccggctgaacatttcttacaagtttggcaagaagaaaaagagatagagttaagtaaaaaattaccttctgaacttgtggaactattccatctcgttgtagaaagcgagcaacaacaagttgttgaaattaatttacaaaaagggaactatgtagttcttatgacaccactttacaatcaaacgaaaattcgtggggctgtagcggtactgcgagatatgacggaagaacgtcgtcttgagaaaatgcgtcaagactttattgcgaatgtatcacatgaacttcgtacaccgatggtcatgctgcaagggtatagtgaagcgattttagatgatattgtgcaaacgaaagaggaaatagatgagtttgttcaaatcatttatgatgaatccgttcgtttaggtaaacttgtaaatgaattgttagatttagctcgtatggaaagcggtcacgtagagttacatattggtgaagtggacatacatccgtttgtggaaaaaattggtcgtaaattccaagggattgcaaaggataaagaagttgaactaacagttgatttccggaatcagattgaagaatatgcgtttgatgcagatcggatggaacaagtgttgacgaacttgattgataacgcaattcgtcatacgaatgcgggtggacatgtaacgcttgtaattgatacgaaaaataatggcctcatttttgaagtacaagattcgggtgtaggcattccagaagaggatattccatttttatttgatcgtttctataaagctgataaagcaagaacacgtgggaaaaagggtggcacaggactcgggcttgcaattgcgaaaaatattgttcaaggccatgacggtaaaatttctgtatcaagtgttgttggagaaggaactacattctctgtatatttaccgaatcgtataatttagatatgcttttttaaagttgataatgaataaagttctgctgttttttatttttttgtaaactcaattaaataaagaatggtagaacttttttctatcttggtcgaatcaagaataacaagagagggtgctgtgaagaaatgaaattatatacaaaaacaggagataaaggaacgacaagtgtaataggtggcagggttgataaagatgatatccgtgtggaagcgtatggaacaatagacgaggcaaattctcatattggatatgcaatgactaaggttcaaggcggggcttttagagatatttacaatgagctcgaaaatattcaacatgaactatttgattgcggaggagacttggcaatagtggaacaaaaaattccttataaagtgacaattgagatggttgaaagtttagaaagaaagattgatttatatatagaagaagccccgccattagaacgctttattttgccaggtggtagcgaggcggcggctattattcatattgcacgtactgttgtaaggagagcagaacgctctatagtatcattgcaaaaagaagtgaaaataaatgaagttgtcttaaagtatgtaaatagattatctgattatttgtttgcgatagctcgagtaataaatgcccgattacaagtgaaagatgtggagtataaccgtagtgcattagtttttcgtgataagaaagagaaggaagtggagtaattcactttctttttttgtatacttttttctgtaatataccaaaatagagaaggtatggtggtaattagaaaacggaggatgtatatgaaagttttaaaatgcggcgtcatgttattgagtatgctgtttgtatctcaattacatgtttatgcagaagaaaatcgatggacatggcctgttgaaggtcagataagtgattattttgggacaaggcatggaaaacactatggtattgatgtagctgcgccgattggaacgcctgtggcagctattcaagatggtagggtaacgaagtcttattattcaagtagttatggaaatgttgtatttattaaacacggagaatatgaggctgtatatgcacatttaaataagagatatgtggggcaaggagattatatttccaaaggagaaaaaattggagaagtagggaacacgggagaatcgcgaggtgcacacttacatctagaacttcatcaaggaagatggacgatggcgaaaaagaatgcgatgaacccattgcttgttttaaatgaacaaagaaatgaagttgtttcttcatcattatatgtcgtacaaaaaggggatactttagttagtattgcacggaaatttagtatgacacttaaggaaattaaagaaaaaaatggattgcagcaagagctaatttatcctaatcaacaattatatgttaagtgaaggaaacatttcaaaaattaaactttgaacaaatttatgttcttcttaaataaggttcaatgtaaatgaaattatatgggcgcttttgctagaactattgagtgaattagagcatctatatctaaaagaaaaccgtcccaaaatttattttgggacggcttcttttaccaaaaaataaagacacatataaatccagaaatagctaaatagctatataagtaaaaaacttttgttcttgttttctcttttgttcgaaacagtacgatagttggttcaattaaaccgattgtcaaacaaagtaggccaagaagcatacaaccaatcgaaatagaatacagggcgatttgtggtgcttgaaatggaatcatccattttaataaaaatgcaataagtgcagtgtaacaaatactaccgatgtatttattcagtggtgtattagaacgaaaaccaggaagtttttttaagaaagagcgggaaacaacttctgtttgtaaagatgtatgctcttcaataattttttgagcttcttttcctttttgaaaaagagataagatccaatttcgctcaccctgaaaaataaattgagaagttgtcaaatagtgatcaatcttcactttattccaactcttccacggatgacgctcacacatttttaatttactttctgtttttttatcatactgataaatactaatgccatcttcatcgaaagtagcatagtatgtctcgtttgagaatgtgcctaaatcaattgggcagtagaaaagtaattctttttttaagtaaaagtattcttttcttaagttttttttcattgcttctcgaatagaatgtctcttgtcttttttcatgacatttcctccataactcagaaaatgttcttatcttaacaattcaatatcttatcacttttaattatatatgactaggtaattcaaaagagaaatgccgaataataaaaaatatggattgtattgtaaaatatctcgcaatttatttgtcgttacgaaaaataaataactaattttaaataagttacaattttttagttcacaatgttatgaggttgttgtataatgaaggggaaaatagaatatcggtctatcttcggggcagggtgaaaatcccgaccggcggtgatgaactatttatgattttgttctaagcccgcgagccgttaaggcaggatttggtgtgattccaaagccgacagtatagtctggatgggagaagatggaggttcaagcgttcaaaaaagatatggatttgaacgtctgtttgatgtgccttaaattctccctttgtgtaaaacacaaagggttttttcgttctatgaaaaaataggcatagcagaacctttccactttccatgagatgatcgatggaaaaggagagagaaagatgaaacaaaaaaacagtgtagtgcagatggtgagtgtagcgatgctaagtagtattgcatatttactaatgatgttagatttcccgttcccagggcttccgccatttttgaaaattgattttagtgatgtaccagctctaattgcagcaattatctttggaccagtagcaggagtgattgtagaggcgataaagaacattttacattacgggattcaaggaagtttaacgggagtaccagttggagaaattgcaaactttattgcaggatgtttatttattggaccagcagctttcttatttagaaagtatcgtactgtgaagagtttaactacaggattaatgctagggacaattacaatggcacttattatgagtgtattaaactacatcatcatattcccggcttacacttggtttttaaattcaccggctatgtctagcgaagctataagaacaacggttgtaacggcaatcttaccatttaatttaattaaagggattgttgtaacaattgtatttgtagcattattctcacgcctgaaagtatgggtgtttgcaaaaatgaaaaatgcataatatatatatatataaaccattagtagtgtgaaactactaatggttttttattaaggaaaataaaatttagatacaaaaaatgcccctcatcaatatgaggggcattttttgaagttaataaaagactattcgaattttaaagcgtctccgtcaaatgattcgtcagcaactttaattgagtcagttggacagccttcgaatgcatccatcatatcttcaattaatacatctggaatttcaacgataccttggttatcatctaatgttacaaatgcaataccttcatcatcatagtcataaatgtctggtgcagcagcgccacaagcaccacatgcaatacaagtatctttatcaacgattgtatattttgccatcttttttccctcctgataatatgtatgtgaaaagctcgccataaaaattataaccttattgtaaaacggtttgtaaaacttttcaacataaaattataatgataatgcttatcaattagagtgtcaacttatttttgaattatgtcataagattttcaaaatacgtaaatatgatttcgtttgatacaatagaatatatacaagtatatagttcttatatgataagtttaatgagcgaaagtagatagtgtaattgtactgaaaagaatgaagttaagattggaaggtggaagcggtcatgcaaatacaatatactttgttgcattgtttaaaacaattgaatggtgaaagaaccgtttcttctatttattatttactaaagggcaaacgttcttcgcaaactttacaagatggaaatatgttccgaatttcttttttgttcggaatatataaatcattgaatagaaatgactatgatggtgaagttgcaaagttgttgcaagcgaattttattcaagaaatacatgaaaatacatatgtgttaacacctacgggtaaaatgcagttacataaatggggggaagtttatgcttttccggcgcatttgcatggtttacattatggtgaattaggtgaaacattttggaaaagattatcattaattattcaaaccatatcaaatttacaacagaataatacgaagtttatcccaattcagcaagatacagaaataatgatgtgggtgaaacgttttctaacaggaataccatataagagaagtgagttggcgagaaaactatggacggaagtacataatcttttagaaaagagcaatacgatagaagcgacgattgtaacatatcgactaacgggttatgaacgtattggttgtacattgcaacaattagcagaaattacgaaacaagatatattcagggtgtattttttattttggggtacaatgcatttctttatacaagaagttcgtgataaagaaaatgaatttccactattagctgaaattatatcttatccaaatgagagagctgaattatttagtttatccacgaaaaaaacatataatttttggagacaaggacgttctttagaagaaatagcgacgattcggaatttaaaggttgcaacgatagaagatcattttgttgaaattgctttgcgagaaaaagatttttctattgaaatgtttatggaaaaagaaaagatagacaaagtaataaaagtaattgaagcattgcaaacgcggaagttacgtgttttgaaacaagcggttggagaagatatctcttattttgaagttcgtcttgtattagcgcggatggagggtgtaaatgaaacttgaagaatatttatataagtggtttggatattctgaatttcgtccaggtcaaaaaggagttattacagatttattagaaggaaaagatgtgatagcaatgcttccgactggaagagggaaatctatgtgctatcagtttccggggcttatgcgagaaggaacagtgcttgttgtatcaccgttattatctttaatggaagatcaagtgacacaattaaagtatgttgtgaaaaaccgagtaatagcatttaatagttttcggacattaaatgaaaaaagagaagcgatgaaaaaattatcttcatataaatttatttttgtttcaccagagatgttacagtcggagttattaattaaggaattgaagaaaattcatatttcattatttgttgttgatgaggctcattgtatttctcaatggggttatgattttagaccggactataaaaaactaaatgtagttattgaaaatattggttctcctacagtattagcattgacagccacagcgacaaaaggggtactgcaggatatcgcaaatagtttaaatttaaagggtgccgcagaacatgtatactctattgaccgtcctaatattgcaatggatgtgcaatttgtagagacgatagaagaaaagaaagaggcgcttttagagcaggtgatgtatttacaagggccggggattgtatattgctcaagtagagcgtggacagaaaggttaacggaatacttgagaggaaaaggtgttactggtgtagctttttatcatggtggtatggaacatgaagagcgtatgttaattcaacagcagtttatgaacgatcaactgcaacttgtaatatgcacaagtgcatttggtatgggggtaaataaggcgaatacgcgatatattattcattttcattatccaactaatatagcttcttacttacaagaaatcggaagagctggaagagatggcgaaccgagtatagctattttattatgtagtccgttggatcatgatttaccaatttcaatcattgaggatgaattgccaagtaagtcacaaatacaatttttattttctttactacaagaaagaatgtttcaaacgaaagaattaccaatagaagatgtagaagaaatttgttataatgcagcaagatttaatgagcaatattggcgtttcgttcgttatcatctcgaacaggttggaattatacaacaacgaagattattattagaaggtttgtcagatgaaattatgaaccgattaatagctgaagtagaaataaggttgcgtaataaatatagtgagctagaaaatatgaagtcatggatacaagttaaaggatgtagacgtgaatatgtgctgcaacagttcggttataggaaagagcaagagttaattaattgctgcgattattgcggtattacaaaagaagattataaaaaaagacgagcgcaacaatcggatttcgactataattgggaaacagagttacaaaagcttttcggcctagaaaagatggaggaatgatgaacattcaaaggcataatgttgaagatatgagtccgcaggaaataaggctgaatctatatataacacagttaattattatcggtattggctgtttactggcatatatattatttcaagatgtaaaagaagtctttaatttatggaaatgggaaccagtatctatacttattataggtggtttgttagcgattggtattgtgttattagattatgttgcaatgcgagtgtttccggagtcttggtttgatgatggtggtattaacgataagatgtttcgaggaatgtccgttctgcatttactcgttattacgttcttaattggttttgcagaagaatttttatttagaggtgtagtacagactcattttggaattgtaattgcgagcttcgtatttgcagtgttacatattcgttatataacaaagccatttttgttttgtttcgtctgtttcattagttttgtctttggttatgtatttgaatggacaggaaatttgtttataacaatctttgcacactttcttgttgattttataatgggactccaattaagaaaataaatggaaggtggtggtgaacaacatgaggaaacgaattcctgattttgaagaggaattagaagttgagcgagtggaagaaaaagaaagtttaccgccgcgtagtgaaattcatagaaataaagaaaaaaaacaaaagtttaaaataaatcacattttcgtccgggttttaacatttctattcattctgctgccaattagtattttgtggtacacggataaatatattcaggtgaagggtgatagtaataatgccggaaaaagtgcgtttgaagtaatcttctttgattcagctaaatctgagtcgcagaaacattctgaaaaagtaataacgcatactgtgaaagagggagaaactttagaaagtatagcgaagcaatatttttcagatggaaatggaattgaagtaattaaaaagtataataacttgcaagaagatgaagtgagtgcaggtcaagaattaaaaattccgataaaagataagtccgcaaagcaagaaagctagtgagttaagcgatcacagtttgttataaaagcctaggattatctttatgaggaggggagtcaaaaatatgatatggattatattattcagtactctcataggcatggggattttattgcttcttgtgatgtataaagaagcgatgcgtaatacggtgttggaacatactttagtatttaaagaatttccgaaaagttttcaaaaagtaaatgtgttttttatttctgatattcatagaagagtcatttcgaatttgttaattgaacaagtaaaaggaaaagtagatctcgtaattatcggaggagatttagcagagaaaggtgtctctttatcaaaaatctctgcgaatattcaaaagttaagagagatagctcctgtatattttgtgtggggaaacaatgattatgagatagaatatcatgaattagatgcgttattattagaaaataacgtaaaagttttagataatacaagagtggtatttgagtctgaattaggagagaaaatttgtttgctcggtatagatgatgttggattgcaccgtgatcgtctagatttggcattggcggattgtaaagaagatggttttcgtatcctagttagtcacaaccctgatataataaaaaaaatgtctggaaatgaacagatttcacttgtgttaagtggacatacgcatggagggcaaatccgattattcccatctaaaaaatatttaaaaggtggcgtatataaccatttaaatacgattctctttgttagtaatgggtatggaacaacattgataccacttcgtttccgagcacctgctcaaacacacatcattacattgtgcggagggaaatgatgccaactcttagtgggaaatataatataaaagccgtttcgaatataattggagttcagccgagtacgcttcgtgcatgggaaagacgatatcaaattattgccccaaagcgtaatcaagctgggcatcgtttatatacagaagagcatattcaaattttaaaatggttaatggaaaaagtttcttccggtatgatgattggacaagcagttcgattattagaagagaatcgtttgcagagtacagttcaaaaagagatacatttcgataaagaagttgttttagtggacgatttgctacaagctttgttaaaatttgatgaaattacaattgctgcattattaaacgaagcttttagtatatattcaacagagaaggttgttgccagtattgttcttcgagtgacagacaaattattaacgtcaaaaaataataatgagatttcaatggtgcaatttcaatatgcactatcatttttacaaatgcgtctagggatggtgtatcacaatgcctcaatgttttcctctttacacaaagttattgtgttagaaaaggatgcattgaaaggatttattttttcaacttatttacgcttaaaaggatatgaggcgatatatattaggacaagcttagctgaagatggtatgttatcagcggtagaggaaatacagccgaaatatgtatttgtatcttttgctgacgaacaagaaatgaaaaagacgatgaactttataaatttattacaagaaaaaagggaatctcttttagttggatttatcggaaagctaggcgttctaaaccagttggacattgaaacaatcttaattggtgatacgaaagaagaatgggatggatggttaaaaatgtcggaatagttgttcgaaaagaaccatctattttctatttcatataataaaaattagatgcattggttacgtagggagggtatgagatgaggctggaacgattaaattacaataagataaaaatttttctaacatttgatgatttatctgaacgaggattaacgaaagaagatttatggagaaatgcaccgaaagtacagcaattatttcgtgatatgatgcaagaagcaaataaggaattagggtttgaagcagatggtccgattgcagttgaagtgttttctctacaagcacaagggatggttgtaattgtaacgaaagaaaatcaagaaatggatacagatgatgagttccgtgacgagtttattgaaatgcaagtgactctagatgaaagtgagcatatattatatgagtttgctacgctagatgacgtaattaacctgtcgaatcgcttatataaccttggtgtaactggcggaaagctatatacgtgggatgagcgcttctatctttgggtggaagaagaggaacaaattcaattgttaaaggcggattttatagctattttagcggaatacggtaatccgtctacagcaaccatttatcgcatcatggagtacggtaaagaattaatggatgttaacgcgatagagcaaatacacaattacttcgtgaaaaaacaaaacctcagctaatacaacatagctgaggttttgtttttatttggagaagggaagggatgattgtaaatactcgaacatactttttgaaaataaaatatgcagttttatgggagtgtggttgatgaaaataaaaaatatttaaatatttaagtattttacttttctaaaagtaataaaaggactataataatagtgaaaacgcttgcaacagaaaatagtttgtatatatttgttagcgttttctattgcattccaaatttaagggtgtatactaggcaatgaaggtttactaaacaagtgaaattacagggggtttacttactatggtagccgaaaagggaactcaaacaaaaacacaacaacaaagggaacaacattttgaactattgaattcaacacaaattgttattagtgaagcgttagaaaaattgggttatccaaacgaagtatatgaattattaaaagaaccaattcgtatgatgacagtgaaaataccagttcgtatggatgacgggactgttaaaatatttacaggatatcgtgcacaacataatgatgctgttggtccaacgaaaggtgggattcgcttccatccgaatgtaacagaaaatgaagtgaaagcactttcaatctggatgagtttaaaatgtggtattgttgatttaccatatggtggaggtaagggtggaattatttgtgatccacgtgaaatgtcattccgtgagttagaaagattaagtcgcggttatgtacgagcaattagtcaaatcgtaggaccgacgaaagatattccagctccagatgtattcacaaactctcaaattatggcatggatgatggatgagtatagccgtattgatgaatttaattcaccaggatttattacaggtaaaccgcttgtattaggtggatcacatggacgtgaaacagcaacagcgaaaggtgtaacaatttgtattcgcgaagctgcgaaaaaacgtggcattgatattaagggtgcacgcgttgttgttcaaggattcggtaatgctggtagcttcttagctaaatttatgcatgatgcaggtgcgaaagttattgcaatctcagatgcttacggcgcgttacatgatccaaatggattagatattgattatttattagaccgtcgtgatagcttcggtacagtaacaaagctatttaacaatacaatttcaaacaaagaattgttagaacttgattgcgatattttagttccagctgcaattgagaaccaaattacagaagaaaatgctaatgatattaaagcgaaaatcgttgttgaagcagcaaatggtccaacaacattagaagcgactaaaattttaacagatcgcggaattttacttgttccagacgtgttagcaagtgctggtggtgtaacagtatcttactttgagtgggtacaaaataaccaaggttactactggactgaagaagaagtagaacaacgtttagaaaaagtaatggtaagatcatttgattctatttatgaaacagcacaagttcgtaaagtgaacatgcgcttagcggcgtacatggttggtgttcgtaaaatggctgaagcaagccgcttcagaggttgggtataaaatattatatcttgagaaaacgtgatttcctttcgagggaatcacgtttttttgttgaagtattaaatgaggtgttgtatatggagaatgaaatgctggaacgagtagaacaattagaagaaaaggttaataggttagagggagaactcgcaagaacgatgaaagctcgcaaaataagtaccgttcggatgttcggggaagggctactgtttctgatatttggtgtggttgtagtagggccgattattgccgttgtaatctcaatttttacttggcttgctgaaaaataaaataaaataaaaataaaaaagaacgcttgttctatgcgaacaaacgtgctatactctccttagataaacaaaacggaaatgattttaaggagagataaatgatgaaaatgacagtagaccaaagatttatgatgccagcagatgttgtagagcgagtggaagtattacgaaacaaacaaagcaagcgtggcacattattacaatcggtaaataaatttttcggtttagatacgaaagaagattgtgtttggttttacggtttttatggagtggctgtaagtatcttgttgtttatggtgttcacttcaaatattttcgattttctcttcgcgtaagaaatatgcgataaggacattgctaccgaatacatatataaggaagtaaggtaatcttctagagcgggagttggtagcaatggcgatgtttcctatagagcgcaattatattggatatggaagttcacgaccggggattcctctgactaaagtgagatttatcgtaagccatgatacggggaatcctggaagcaatgcgataggcaatcgagattactttaatgaattacaaccgaaagcttcggcacatacatttatagatgataaaacaatattggagattattcctataaatgaagttgcgtatcatgttcgatatggtgtgccgacggataatgacttatatggctatgacgcgaataaggcggccattggagtggaactttgttatggtggtgatgttaacttttgggaagcgtataatcgttttacatggtatcatgcgtatttatgccaaaactttggcttaaatccgaaaaaagatatcgtgtcacataaaacgcttgatccagctagaaagattgatcctgagaatgtattagggaaacaaggtattaaatttcagcagtttttagcagatgtctatcggatgtacgtttcgtttagatgacaaatatatgaaaaatgaatacaataaagataggtgcctactgctgtaagtaggttttttcttgtttttataaatagtgcattggtagaagactaggagtggacgagtatgcagaaagaaacagttattataatcggaggcggtccgtgcggattagcggctgcaatttcgttgcaaaaggtagggataaatccgttagtaattgaaaaaggaaacattgtaaatgccatttataattatccaactcatcaaacatttttctcttctagtgaaaaattagaaattggtgatgtagcttttattacagaaaatcgtaagccatttcgaaatcaagcgcttgcgtattatcgtgaagtagtaaaacgtaaatctgtacgtgtaaatgcttttgagcgagtggagaaagttcaaaaagatggagaagtttttcaggttgagacgacaaagcgtgatggaagtaaggaaatgtatatagggaaatatattgttgtagcaactggatattatgataatccaaattatatgaatgttccaggtgaggaattgaaaaaagtagctcactattttaaagaggggcatccttattttgatcgagatgtagtagttataggtgggaaaaactcgagtgtagatgccgcgttagaacttgttaaatctggtgcacgtgtaacggtactgtatcgtggaagtgagtattcaccaagcataaagccttggattttgccggaatttgaggcgttagtacgaaacggtacaattcaaatgcattttggagctcatgtgaaagagattactgagcatacattaacgtttacagttgatggtgaagcttttacaatcaaaaacgattttgtatttgcgatgactggttatcatcctgatcatagcttcttaacgaagatgggtgttcagattgatgaagaaacaggacgtccaatttatacagaggatagaatggaaacgaatgctgaaaatattttcattgcaggtgtcattgctgctggaaataatgcaaatgaaatatttatcgagaacggtagatttcatggagatgcgattgcgcaaaccattgcatcaagagaaaaataaaaaggagctgtcgggaaaatctcgacagctcctttttattcgtgcataaacatattttgaatggattcatgagaatttgtattctctaatgcaacaagtaatttaatgcgtgctttttgtgcatttaagccgtatgtgaatacaatgcccatatcttttaagtgtttaccgccaccttcatacgaatatacgtcttgaacgataccgttgaaacagcgagaaactaatacgacaggaatacctttatttaataatctttctaggctaggtagtgttcttggagggagattaccttgtccaagagcttcgataacaatgccgtctacaggaagattttcgattgctgctaataatgtatcatccatgccagcatatgcttttagaacaactacatttttagacactttatttatcgtatatgattcgcgatgtactaaagcgtgatggaagacaacgccgcgttttgttaccattccaattggtccgtattgtggactttggaatgttgcgacattacttgtatgtgttttcgttacatttgtagcgcaatgaatttcgtcgtttaatacgactaaaacacctttttctgcagcttcatcacaactagcaacttttacagctgataagaagttatatagaccatcagcacctaactcattactagagcgcattgcacctgtcactacgatcggaatagttgcttgtactgttaaatctaagaaataagctgtttcttctaatgtatccgtaccatgcgtaataactacgccatgaatgttgtcttgttttactctttcatcaatgatgacttgtaattgtaacatttcgctcggtgtcatatgaggagatggtagatggaacacatcttcaacgattaaatcaacatcgccttctaaatcaggaatgaattttaaaagaggattttttttacctggttgtacgaccccagtttctttatcttcctccattgcaattgttccacctgtgtgtaaaactaggattcttttcaatgcttatacccctttcaagtaaaaaaatacatttagaacataacatgttttgagtaaattcgacaatggaaatgtataaaagtatgcctcgaaaatgacaataaaattaactgctatatgtacgatgtataaaattacgaaacgaaatgtgcaaatatagtataggagggagaaattacggtgaaaaagatggagagaatttttattcgtatattaataatacaattcatttgtctttctgttgtacaattgttatttatacataagtcatcagtgaaatatttatctaaaatcgtttattatgagggtgttatggtaaaaaacaaagtggaaatcttgcaggtgaatcggtagttttcattttcttctatgaaggattatgctacaataattgaggatttaatgacgcgaagcaaatgagaagaagcagggtgaacacctgcttttcgttttgttttataagtgaaaaaatgaggtgttacaatggataaacgaatttcaattgctatagatggtccagcagctgcagggaaaagtacagtggcaaaagttgttgcgaaggaactttcttatgtttatattgatacaggcgcaatgtaccgtacgcttacatatgcagcccttgaacaaaaagtagacattgaaaatgaagagcagttaatggaagttgtaaagaatgtaaatattgagtttcagcaaggagaaaatacacagcttgtatttttaaatggacaagatgtttctgaagtaattcgtacacctgatgtgacgaatcgagtatctattgtagcgaaacatcgccttgttcgtgaagaaatggtacgtcgtcagcaagagttagcgaaaaaaggcggcgttgtaatggacggccgtgatattggtacacatgtattaccggatgctgaagtgaaaatctttatgcttgcttctgttgaagaaagagcggaaagaaggcatttagaaaatttaaataaaggtttcgattctaatttagagcagctaaaagaagaaattgctcagcgtgataaattagattcagaacgcgaagtttctccactaaaaaaggctgatgatgcattggaattagatacgacttctttatcaattgaagaagttgtccaaaaaattatgagcattgtttctggagtgtttgcgaaataaagaaaggggataatcctctttctttttttgtttaaatagaaatgtaaaggatacgtgaattatgagtctctttccttgacaaatgagctgatttgtaagaagttagttaaagaggaataaaactgtcagaatatattcgctattatatttcaaaacatacttttttcaagctggttttgctgtatactatttatataggtttaatatattttcttgtgaatgttattgaaaaagagtatgtgatgagaaattcttaaacatgcaaatgaaaactttgttttcatttcgtatatacataaaaaatgctttgtcaattctgtagggaggtatttccatggtagagaaaatgaatgaagaagttatggattcaaaagaattacaagttggtgacgttgttacaggttctgtaacgaaggttgaagagaaacaagtgcttgtaaatgttggatacaaaacagatggcgtaattccaattagtgaattagctaacgttcatattgaaaaagcaagcgatgttgtagaattagatcaaacactagagttgaaaattattaaattagaagaagatgatcttgtcttatctaaacgtgctgttgatgcagaaaaagcatgggtagaactacaagagaaatttacttctggtcatgtatttgatgttactgtaaaagatattgtgaatggcggattagttgtggaccttggtgttcgcggttttattccagcttcacttgtagaagtacattatgtagaagactttactgactataaaggtaaaacattagcggtgaaaattgttgaattagaccgtgaaaaaaatcgtgtaatcctttcgcataaagcggtagtagaattagaactagattctaagaaaaaagaagcaatttcttcattaaaagaaggggacgttgttgaaggaacagtacaacgattaactgactttggcgcattcgttaatgttggtggagtggacggtttagttcacatttcacaaatttcacacgaacgtgtagagcaaccttctgaagtgttagagcaaggtcaaaaggttaaggtaaaggtgttatctgttgatgctgatacacaacgtatttctttatcaattaaagcagctcaaccaggaccttgggaaaacgttgctggcgaaataaaagctggagatattcgtgagggagtagtaaaacgccttgttacatttggtgcattcgttgagattttaccgggcgttgaaggacttgtacacgtatctcaaattgcaaatcgtcacgtgaaaaatccgaatgaagtattggaaatgggacaagaagtaaaagtgaaagtacttgaagttcaagtagcagagaaacgtatttctttaagtataaaagaagcgcttgaggaaaataatgtaactgaagattatagtcagtatgagccaaatgctgattctgctactttccaattaagtgatattattggtgaacaactgaaaaaattaaagaaataatgaggggtacaagtggtaagggcaaaacgtaaattagatcatattgaatacgctctttctactggtcagtctcgtacgcatggctttcatgatattgattttgtgcatcaaagcttgccaaattcaaattatgacacaataacatgtgaaacaaaaatcggcgaactttcactaagttcgccgatttttatcaatgcgatgactggtggtggaggagagaaaacgttacatattaatgagcaattagcatatgtagcgaaacatcataaccttgctatggctgtaggttcgcaaatggcggcgttaaaagatgaaagtgaagctgcttcttataaggtgatcagaaaggtaaatccaaatggtattttctttgctaatttaggtagtgaggcaactatcgaacaggcagagcgtgccgttgatatgattgaagcgaatgcattgcaaattcatttaaatgtcatacaagagttaacgatgccagaaggagaccgtgattttactggagtacttcagcgcattgagaaaattgttttaaatagtaaagttcctatcattgtaaaagaagttggatttgggatgagtaaggaaacagtgcagcagttagcgaacgtaggtgtaacagcaattgatattggtgggcaaggtggtacgaattttgctgctgttgaaaatgaaagaagacagcgaatgctttcttattttaataactggggcatacaaacagcaacctcgattattgaagcaacctctacaaataataacctctcttttattgcatctgggggcatacaaacagcgcttgacgtagcgaaagcgatcgcattaggggcgaatacaactgcgtttgctggttactttttacgtattttaatgcaagatggtatcgagaagttagtggatgaaattgagctcctacatacagatttgaaatttataatgacagctcttggtgcgaaaacgatagaagagttgcaatctgtacctcttgttgtaaagggtgaaacgtatcattggttaatgcagcgtggtattgatactgcgcattatagtaggagataaaaaatcaaccgttcggttgattttttttgttctattctttttcgtaatataaagtggagaaaggaattagtattatataaaaatatcatttcgtaaaaattgcaattgaaaaagggttgaaaaatgtagatggtgtgttgtcgaattactggagagaacttaatttttaataggaataggtgaagataaaaagaagtaatgggaggatatagtgtgtgaaatattatttcaatataaatagaaaacattaaactgattatgtaaaagacggtttcgtacaatatcgaaaccgtctttttgcattaattagtgctggttttgttttcgagcctgttctggtgtatcaagtccagttgcacctggatattgtagtgattgatcacgatcggattcaacgcggcgtgattctcgtagttttcgttcttggcgatctttacccataatgaataacacctccttgttaaaagtgttgctgttataagaaaaaactatgcgtaaataaagtggattaactttcataaaaagttcccataatggaaaacataggaggtgaagttgatggatggaagtactttttattttgtagcttggatagggtggatcattgtaaccttttttatgaaaaaggaccttattcggtggaagttaggcgcttgtatactgatttttataatttgctctccgttacatgtaacgatcgcctcattcgtggtatcagtaaatgctcttttactttgtattatttcttttatagggatcacgctatattctgtctggaaaaaattatatagcttactttcggcacttattattgcaatgttatatacaagttttcatctgttagaaatatatgatccgatttggattgtggtggatagagtgtttctgctaagtagtggtcttgtgtatgcatcggtgttattgcatggagatcgcatattacgattatgttctctatatgtagggatgttacaaggagagctgctagtgacatttatttttaggaaattgaattttccatatgattacggtagtttagcattttttgatatcgtcgccatttctacattattcatggcaatattgttttggattgcaaaagcatcagtatacatggaacggtttaagagaaaaacacgtaaaagaaaggcgagggtaatacatgactgaatatacaccagccattttatgcggcgtaatagcagggacagttacaagggtgctaatgcttcggacggatacacggcaatatccgacgaggctacatgggaaaattattcatattgcaatggggttaattgcagctgctttaggagcgattgcaatcccgtctattttgaaaaaagatttttctgccattacatttcttacattagcagcgacacaatttcgtgatgtacgtaatatggaaagaaatacgcttcaacaattagatgggtatgagctcgtaccgcgtggaaatacatacattgaaggaattgcattggtttttgaaagtcgcaactatttggcaatgttaacgtcgtttgcaacgacgtttgcgtatataggattccgttcatggattgcaggagtaattatggctataatcgcattttttattgcgaaaaaattaatgtctggtaaaaggctacatgatcttgttgaaattgagcacgttccgcttcgttttgaaggagcagggctttatattgacaatatttacattatgaatattggattgccagcaagacaagaagaaattatgaaatatggtatgggttttattttaaagccgaaatcaattgatgcgatggttacaatctcaaatttagggcaacgacaagctattttacacgatgtttcagtagcgttagggatttatagagattctggtacaccagcgcttgtaccgttagcaaagcgtgatttagaggatggcagggttgggatttttgtcctgccgcaagatcaagatgcagagaaagcgataggtgtcataggaaatgtaccaacgttagaaagtgctgtccatatgtcatcggaagccccgaaaggaaggggagataagagatgatgttagaaagtgttattctggcagttataacaacgactccagaaaaatttgcaggtggtgctcctttattcgtttgcgaatcgacagaggaactagaatttgttgcaaataatttagaggcaattttagatggtattgcacatcgcttacaagagaatgtatatattattgtgaaacattagcaacgtgtgttataatgtgaggtgttttgatacgttgagaaatattctggaatgcaaatcccttcttgcacaaagaagggttttttacataataaacagaagcaagttgaaaggatgaaagtatatgccgaaaccagtaatagcgatagtaggtcgcccgaacgtagggaaatctactattttcaatagaattgttggagaaagagtttcaatcgtagaagatattccaggtgtaacgcgcgatcgtatttatagcgctggagaatggttaaatcatgaatttaacattattgatacgggcggaattgatattggagacgagccgtttttgacacaaattcgtcaacaagctgaagtagcaattgatgaagcggatgttatcatttttatgacaaacggtcgtgacggtgtaacagcagctgatgaagaagttgcaaaaattttatatcgttcaaataaaccggttgtacttgcagtaaataaagtggacaatccggaaatgcgcagtgacatttatgacttttatgcattaggatttggcgaaccattcccaatttcaggtacacacggattagggttaggtgacttactagacgaagctgcacaacattttccaaagattgaagaagacggatatgatgaagacacaattcgtttctctttaattggacgtccaaacgtaggaaaatcatcacttgtaaatgctcttcttggtcaagagcgtgtaattgttagtaatgtagcaggaacaactcgtgatgctgtcgatacaccatatagtaaagatggaaaagattatgtaattattgatacagctggtatgcgtaaaaaaggaaaagtgtatgaaagtacagaaaaatatagtgtacttcgtgcgctaagagcgattgaacgttctgacgttgttttagtcgttttagatggtgaagaaggaattattgagcaagataaaaaaatcgctggatatgctcatgattcagggcgagctgttgttatcgttgtaaataaatgggatgcagtgaaaaaagacgaaaaaacaatgaaagcatttgaagaaaatatccgtgctcatttccaattcttagaatacgcaccaattgttttcttatctgcaaaaacaagaaaacgtacacaaacattaataccggttatcgatgaggtaaatgaaagtcatagtatccgtattcaaacgaacgtattaaacgatgtaattatggatgcggtagcgatgaatccgacgccaactcataatggtagccgtctgaaaattttctatgcaacacaagttgcggtaaaaccaccgacatttgttgtgtttgtaaacgatccagaattattgcacttctcatatgagcgtttcttaaagaatcgcttacgtgaatcatttggcttcgtaggaacgccgattcacattatcgctagagcaagagactaatggagaggatgtgattttatgacaaaaatcacagtagtaggagcaggtagctggggaacagcgttagcgatggtattagctgacaatggacatgatgtacgtatttggggaaatcgcccagaacttatggatgaaattaatacgaaacatgagaatagtcgatatctcccaggcattacattgccaagcacaatcgtagcctactcttctttagaagaagcattagtagatgtaaatacagtactgttagtagtaccaacgaaagcgtacagagatgtattacaagagatgaaagaaattgttactgaaccaattacttggattcatgcgagcaaaggaattgaacctggtacgtcaaaacgtatttcggaagtgattgaggaagaaattccagagcacttaattaaagatgttgttgtactgtctggaccgagtcatgctgaagaagtcggtttacgacaagcgacaacagttacgtctgcagcaaagcgtatggaagcggctgaggaagtacaagatttatttatgaatagttatttccgtgtatacacaaatccagatatcgttggagttgaacttggtggtgcgttaaaaaatattatcgcattagctgctggtataactgatggtcttggattaggtgataatgcaaaggcggcattgatgacacgtggtttaacagagattgctcgtttaggaagaaaaatgggcgggaatccgttaacgtttgctggtctaactggtatgggagacttaattgtaacgtgtacaagtgttcatagccgaaattggcgcgctggaaatatgcttggaaaaggacactctttagaagaagtgttagaaagcatgggtatggttgtggaaggtgtaagaacaacgaaagctgctcatgaattggcagagaaaatggaagttgaaatgccgattacagctgctttatatgacgtgctgttcaatgggaataacgtaaaagatgcggtaggctcattgatggggcgtgttcgaaaacatgaagtggaagctatacctgatttactgtaaagaaaagcgacagaagtacatttgtacttctgtcgcttttttattttttgggtcttttcaccattttttcatttttgcataggatgaagagtaacttgaggagagggtgaaaagaatggataataatatttttaataatattgagaaggaagcgaaagtaaataaagaggatatttttaaattagcatcatccgtgcaaaatgcgaatttacgtgatgaaactgtacttcgtcaattaattcatcaagtggctcttatggcgggacgtgaagtgccgaaagagcaagaggatcaaattgtaaaagcgattattaataataatatgccaacagattttggctcgttaagcaaaatgtttaaaaaataaattatgagaaacaaagagtttgtagattgcatatgatagccatgaaagaatgggaatagagctgtttttgggcatatttggtcaaccgaagtgagaggtacaatcgcttcggttttatttttgcctagattggtgaaaaatgctggaaaacctattgattaaagttatatattcgcaatttgtagtaaaatgttctttttgtatttgtttaaagattttaatttgttaaaatagtataaaaatagattgataaaaaggggtgtgtatatgtcagaagggcttatgaaaatgtggttagctttaggggcaattggatttatgttttttgcagtaagttttattttattaagtagacataaaataaagaataaatttttgaaagggattacagcattagtagcgtacacccttatgattgtgtcaggaattgttatttttcttgttgtatttagtggacctgtacagcagtaaatggaatggtctcgaaaatactacatacagagcaaattagattagtatgaaaaggtgatgctagtgaaaaaattacatattattttaatattttgttgtatgagccttttaacggggtgtctgtatccgaaagaaaatatgaagcaaaatgcggttccttatgaagatcagctacaggttgttcaaaaagctgttgtgacatttaaggagcaaaatgatgggatattgccaattaagacgagggatatgagtacacctatttatcaaaagtatccgatcgattttcaacagattgccccgcgttacatacaagaagcgccagggaatgcgtatgaaagtggaggagtatatcaatacgtattaatagacgttgaaacaaatccaacagtaaagttaattgatgttaggatggctgaacaaattcaggaactatctttaaagcttaggatgtatcgtgatgaacatcaatatccaccttttaaaaaagtaatttcagatggtgtatatgaattagatttcaaaaaactaggatataaagatgtgccacaagtgacaagtccatattctggtaaaggacttccttttgtaattaatgaaaaaggagaagtttttgttgattatagaatcgacttatatgacgctttgaaaaaaaatgaagggcagtttacggagggagaagatattcgaaatatactttcgaaaggttccccgtttgtaccagcttattctttaccgtacacagtaaaggatggagaaccaatttttttaaaatgataagtcatgaacctttcttttagtgaataagttctagaagaaaggttttttatgttatacaacttacgatgcaaacaaaagatattttttaatagtcatatgaaattggacaaaattatatgatatattgtccgaacttctagaataccattatattatatcagatattataggcaacgttagagaaggtattagttgactataaacgcggaattattcccaaaaattttgagggagggaatcacttggaaaaggtagatatttttaaagatattgcagaacgaacaggcggtgatatttattttggagttgtaggagctgttcgaacagggaaatcaacattcattaaaaaatttatggaacttgtagttattccaaacattgagaatgagtctgaccgtcaaagagcgcaggatgaattgcctcaaagtgctgctggtcgtacaattatgacgacggaaccgaagtttgttccaaaccaagcggtttctatcgaagtagatgaaggacttgaagtgaatattcgattagtagattgtgttggatatacggttcctggagcgaagggctatgaagatgagaatggcccacgcatgattaataccccttggtatgaagaacctattccattccatgaagctgcagaaatcggcacgcgtaaagtaattcaagaacattcaacaattggtgttgtaattacaacagatggaacaattggtgaaattccaagaagagattatatagaggcagaagaacgcgttgtaaatgagttgaaagaagtaggaaaacctttcattatgataattaatacggtacagccgtatcatccagatacagagcaattacgccaaagtttatcagaagaatatgatatcccggttattgcaatgagtgtggagagtttaagagaaacagatgtatataatgtacttcgtgaagcactatttgaattccctgtattagaagtgaatgtgaaccttccgagctgggtaatggtgctaaatgaagggcattggttgcgtcaaagttatcaagaagcagttcaagaaactgtgaaggatataaaacgtcttcgtgatgtggatcgcgttgtttggcagtttagtcaatatgaatttattgatcgagcgagcctagctggcattgatatggggcaaggtgtggctgagattgatttatatgcgccagatgaattgtatgatcaaattttaaaagaagtagtaggagtagaaattcgggggaaagatcatttattaaagcttatgctcgatttatctcatgcgaaaatagagtacgatcaagtggcggatgcactgcgtatggttaagcaaacaggatatggtgtagcagcgcctgcattagcggatatgagcttagatgagccagaaattattcgtcacggttcaaggtttggtgtgaagttaaaagcggtagcgccatctattcatatgattaaagtagatgtagagtcaacgtttgagccgatcattggtactgaaaagcaaagtgaagaattagttcgttatttaatgcaagattttgaagatgacccgttatcaatttggaattctgatatatttggacgttcacttagctcgattgttcgagaaggaattcaggcgaaattatctttaatgccagaaaatgctagatataaattaaaagaaacgctagaaagaattattaatgaaggatctggcggattaattgcgattatactataagaaaaaatccctctcattgtagagggattttttgtttttttgattataaaatagaaaaataaacagtcattatctaatacattgttgtaaattgtcaagtttcatcagattttcacattttcagagtaacaatttccttaaaaatattgaattataaaggagaatcgtataatataggcgttgataatgatttatctacatctttgtagtatagaatttgcaaaaattgcctacaaatgaaagtaagactcattttatgatcattatacagtcttatctttgggaggaggtgaatggcatgaacaagacagatttaatcaatgctgttgcagaagcaagttccctttctaaaaaggacgcaacaaaagcagtagacgctgtttttgattctatcttagaagctttaaaacaaggtgataaagtacaactgatcggattcggtaacttcgaagttcgtgagcgtgcggctcgtaaaggtcgtaacccacaaacaggtgaggagattgaaatcgctgcaagtaaagtacctgcattcaaacctggtaaagcgttaaaagatgcggttaaataatccttacatattaacagggaagaagagtttcctttttgggaactcttctttttgcttttaaaaacataaatatgctagaatgtgttcgtatcacttttaggttttcgggagggctagcggatggcaaaagttaatttagaacaaattgaacatgcagtacgccttattttagaggcgattggggatgacccaaatcgtgagggagtacttgatacaccaaagcgtgttgcaaaaatgtacgcagaagtgttctcaggtatgcatgaagatccgaaagagcatttgcataaagtattcggagaagatcacgaagagcttgtactagtaaaagatataccattttattcgatgtgtgagcatcatttagttccattctatggagttgctcacgttgcatatattccgcaaggtggaaaggtgacagggttaagtaaattagctcgtaccgtagatacaattgcacgtcgcccacaactgcaagaacgtattacatcaacagtagcgaactctattatggaagtactagagcctcatggtgtaatggtagtagtagaagcagaacatatgtgtatgacgatgcgtggtgtaaaaaaaccaggtgcgaaaacagtaacgacagcagtgcgtggtgtgcttgaaaatgatgctgcagcgcgcagtgaaattttatcgtttattaaaacgaagtaaagaaaagcgggaaactgcttttctttttttttttagtaaataaatgatatagttttaactagacagagtgagattagaaagattgcttacatgaatggtaggtgtagccaagttttggttatagaaaatagagtgtatgtgttataataagttttatgaattagaaaacaagggtgattttttgtgtgtgacatctacggagggtatgcgagtataaaagaaaaattgatggagaaattacgccatccttactttataaactatattgaagaaccatttattgatgaagaaaagatagcattgttatatggtgctttaaagagtgcaaacttacatatagaacaaattgagcattacgtagtaacaattatgcttgtacaaattgcgcttgatacgcatgaaagggtatcaaataaagcaggcgaggaagagattgaattccataaatgtcgtcaattaacagtacttgcaggcgattactatagtggactatattattatttattgtctatgaatcgtgatattgttttaattcgtgcacttgctgaaggaattaaagagataaatgaacacaaaattatgttataccaaaaagcgcatgaaacgacggatgacataatgaaaagcatagtaatgattgagtctgcgctccttcaaaaaacatgtgatcattttcagttatcacattggaagccatttatcacatacgtattaggtggaaatcgccttcaaaaagaaattcaattgtatgctgataagcaacattcgcctgtttttcaagctatgcaagatgctttaggggataaagcagaagtagtgattaatggttggatgaaggaattgagaaagaaagaaaaacaatttttagaaaatcacacagacataaatgaaataaattctgtgttaaggaataaatagaagacataagcaattttacattggaagaaggtacgagcatgcaacaatcaaaagaagaaagagtacatgacgtatttgaaaagatttctgataaatacgatgtgatgaattctgtaattagttttcaaagacataaagcgtggcgtaaagaaacgatgcgaattatggatgtacaaccaggcagtcaagcgcttgatgtatgctgtggaaccgcagattggacaattgcgctagctggagccgtaggtgaacaaggaaaggttgttggcttagacttcagtgaaaatatgttatctgtcggtaagcaaaaggtagaggcgttacaattaaaacaagtagaacttctacatgggaatgcaatggaacttccgtttgaagataatacgtttgattatgtgacgattgggtttggtttacgtaacgtaccggattatatgcacgtattaaaagaaatgacgcgtgtagtaaaaccaggtggaaaagtaatctgtttagaaacatctcaaccaacaatgattggttttcgacaagggtatattttatactttaaatatatcatgccgttatttggaaagatgtttgcgaaaagttataaagagtattcatggcttcaagaatctgctagtacgttcccagggatgaaagaattggctcaaatgtttgagcaagctggacttgaacgtgtgcaagtgaaaccatttacttttggggtagcagcgatgcatttaggtattaaaccagaatcaaaatagaaaaaagaagttttaggttaaggtgaacaatatgaagttacaacttatgtactcttttttacgatcggatattaatgtgatagaaaaagaattaaaaaagacagtcgcttctgaacagccattagtagaagaggcagcattacagcttattgaagctggtgggaaacgaattcgtcctgtatttgtgttgcttgcagggaaatttggagattataagttagatgcgattaagcatgttgctgttgcgttagaacttattcatatggcttctcttgttcacgatgatgttattgatgctgcatttttacgacgcggcagtgcgactgtgaatgcgaaatggggagatcgtattgcgatgtatacaggggactatctgttcgctaagtctcttgaatgtataacaaatatcgaaattccagaggcgcatcaagcgttatcacatactattttagaagtctgtaaaggtgaaattgaacaaattaaagataaatacaattataaccaaaatttaagaacgtatttaagaagaataaagcgaaaaacagcattattaattgccgcgagttgtcaattgggagcgattgctgctggtgctaatcgtgatacggtaaatcgtctattttggtatgggtattttgtaggaatgtcttatcaaattattgatgacattttagacttcgtttctacagaagagaaacttggaaaacctgctggcggagatttactacaagggaatattacacttcctgctctatatgcgatggaagatcccgtacttcgtcagaaaatcacatctgtacatgaaaattcaacagcaagtgaaatacaagaaattattgatgctgtaaaaaatagtacagcaattgatcaagcatttgcatttagtgaacgttatttacataaagctttagaaataataaaaccactcccacgtggaaaagcaaagtacgcattacaaaatgttgcaaagtatattggaaaacgaaaattttaatgtttattctaaaaaataaaataatctctctatttcaaaactattgcacaattgtgataagggtgataatatgtgtgtggggatatacaattacatacataattcagaagtggagagattttttatggaaaaaacatttctaatggtaaaaccagacggtgtacaacgtgccttcattggggaaattgtagctcgttttgagaaaaaaggctttcaattagttggtgcaaaattaatgcaagtcactccggaaattgctggacaacactacgctgagcataaggaaaaacctttctttggtgagttagtagactttattacatctggacctgtgttcgcaatggtatggcaaggtgaaggtgtagtagatacagcgcgtaacatgatggggaaaacaagaccacatgaagcagctcctggaacaattcgtggagatttcggtgtaactgttgcgaaaaacattatccatggttctgattctttagaaagcgcagagcgcgagattgctattttctttaaagaagaagaattagttgactactcaaaattaatgaatgaatggatttactaattattttgaaataatttgtaaacgctttaatcactgtgataatagtaaaaagtgcaaggagaataggggtattcttcttgcacttttttattttcagttagttacgaagtttgagctgttatgatatgttgatatttaaattaggcctatcggaaatatagaataagaaaatggtcgatttatgatataatttctttaatatttttagaatgataaaagttaatatagtgagataaatacatatacgaaaagaggaataacgtatgcgatatattacagctggtgaatctcatggtccacaacttacaacgattatagaaggtgttccggcaggattgtctttagtagcagatgatataaacgaagagttagctagaaggcaaaagggatatgggcgcggtagacgcatgcaaatagaaacggatcaagtgcaaattttaagtggtgttagacatggagaaacattaggttcccctattgcacttgttgttgaaaatcgtgattttgcacactggacaaaaattatgggggcggagcctttaactgagcaagaagaaaaagagatgaaaaggaaagtgacaaaaccaaggcctgggcatgctgatttaaatggtgcgattaaatatggtcatagagatatgaggaatgtactggaacgttcgtcagcgcgcgaaacgacggtgcgtgttgctgctggtgcggttgctaaaaaggtgttagcagaacttggtattaaagtggcgggccatgtaattgaaattggcggtgtacaagctaaggagattacgtatagttcaattgaagaattaaagagtattacagaagcatatcctgtacgttgcttagatgaagaagctggtaaccaaatgatgaaagcgattgatgatgcgaaagcaaatggtgattcaattggtggaattgttgaagtaattgtggaagggatgccaattggagtaggtagctacgtgcattatgatcgaaaactggatgcgaaattagcagctgcaattatgagtattaatgcttttaaaggtgtcgagattggaattggttttgaagcagcgcatagaccaggaagtgaagttcatgatgaaattctgtgggatgaggagcatggatatacacgaagaacaaataatgcaggtggactagaaggcggtatgacgactggaatgccaattgttgtgcgcggtgtgatgaaaccgatacctacactttataaacctcttcaaagtgtagatattgatacgaaagagccttttacagcgagtattgaacgttcagatagttgtgcagtgccagcagctagtgtcgttgcagaagcggttgtggcttgggaattagcgacagctttaatagaacaattcggattagatcgtatggaactaattcgtgaaaatattgagaaacataatgaatatgcgaggggattttaatgggaaacatacatattcaaacgaaatcaaaagaatatgatgtacatgttggtaaagaagcgttgtcaaacttaacaacgatcgttcaaaatatgcagccagcggtatctaacgtaatgatcatttcagatgaagctgttgcatcactacatttacagacagttatcgatgcattacaagtagagcagcacgtgttttcgtttgttgtaccaagtggcgaaaaagagaagtctttcgaaaatttctatgcggctcatacgtcagctcttgaaaataaattagatagaaattctttaattcttgcacttggaggcggaatgattggagatttagctggttttgttgctgcatcgtttatgcgtggtattcgctttgtgcaggttccgacaactttattagcgcacgatagcgctgtgggtgggaaagtagcgattaaccatccgttaggtaaaaatatgattggtgcattccatcagccagaagcagttgtatatcatacaccgtttttacagtctcttcctgaaaaagagtggcgttcaggttatgcagaggtgataaagcatgctcttatcggtgatgtggagctataccattggttaaaagaagaagtgcaaacattagcggatcttcatgatgagaagttaatccatatattaacgaaggcgattcctgtaaaggcaaatgttgtgtcacaagatgaaacagagaagggtgtacgtgctcatttgaactttggacatacgttaggacatgctcttgaaaaagagctagggtatggaaatattactcacggtgacggtgtagcggttggaatgttattcgccatatttttaagtgagcaagtgtacaaggttgatcttgcttatgaagatatgaagcagtggttcttgaaatacggctatccaaaaatgccaagggatttgaatgtagagcgcctcgttcaattgatgaaacaagataagaaagcaaatgcaggagcaattcatatggtgcttatgcaggaatatggggtagtgaatgtcgtatctatttcagatgagactgttcatattgcgttagaggcatttcaaaaagatatgatttaaaatgatagcgaagtgctgtgaagtgctcatttagaggtattctcgtaatagtgacggttatgacaaaagattacagtaaggggctataacccatgcccatcaacttaaggatagaaactctacggttttccattaattgaaatggattttgtacatgcttaaacaagcgaaaatgtacatgtttatcttgacatttacaccaagaggtaatgtattcttgagcaataattgctttacgatgaaaataagccgttttattcggcgaaatattttcaacagcacctatgagcgattgatgccaaatactagcatctttattcggtgcatgagaaagaaagtattgcatgatttgaatgcctttaaggggaataggtttatagacataggaaccagagcgcttgaaattttcagggatgttaccgccattaaaaaattcaacagcctttatataaggaacttcttctataaagagagaggggctaccagtttcaagaagaggtgaagaatgagatttacctttgtgagaaataaataaagcataagaataaagaatctacatagagttcaatgaaaacagttgcaaactgttcatattttgttatgatagtgttacgaaaacgtttgcataaaaattccgatgggatgcaaaaggagagaatgactatgaataagacatggtggaaagaagcggttgcttatcaaatttatccacgaagctttatggattcaaatggtgatggtattggagatttacaaggtattattgcaaaactggattatttaaaagatttaggtatagatgtaatttggatttgtccaatgtataagtcgcctaatgatgataatggttatgatattagtgattatcaagatattatggatgagtttggtacaatggcagactttgatgctttactagatgaagttcataagcgtgatatgaagcttattattgatttagttattaatcatacgagtgatgaacatccatggtttattgaatcacgttcatctaaagataatccgaagcgtgattggtatatttggcatgatggtaaagatggtgcggagccaaacaactgggaaagtatttttaatggttcggcatgggaatatgatgaagaaacagaacaatattatttacatctattctcacgtaaacaaccagatttaaactgggagaataaagaagttcgcgaagtactatatgatacggttaattggtggcttgataaaggtattgatggtttccgcgttgatgcgatcagtcatattaaaaaagaagaaggcctcaaggatatgccaaatccaaaagagttaaaatatgtgccatcttttgataaacatatgaatgtgaaaggtattcaacctttattagaagagctaaaagaaaatacattctctaagtacgatattatgactgttggtgaagcaaatggtgttaagattgaagatgctgagctttgggttggagaagagcaaggtaagttcaatatggtattccagtttgaacatttaagtttatgggatgcagagaagaagaaagaccttgatgttgtaggattgaaaaaagtattaacgaaatggcaaaaaggattggaaaataaaggatggaacgctttatatattgagaatcatgataaaccacgtatcgtttcaacatggggagatgacaaacaatattggcgtgaaagtgcaacagctctaggagcgatgtatttctttatgcacggtacaccgtttatttatcaaggacaagaaattggtatgacaaatgttcagttgccaaatattgaagattacgatgatgtagcaattaaaaatttatatcgcgagaaaattgcagagggcgtaccacatcaagatatgatggagattatatgggcttcttgccgcgataattcccgtacacctatgcagtggaatgatgagatgaatgctggtttcacaacgagtacaccttggtttagcatgaatccaaattacaaagaaattaatgttgagaagcaaaaaaatgaagaaaagtctattttcaatttctataagaaaatgattgctctgaaaaaagagcacgatgtactgaactatggtacgtacgatttacttttagaagaagatccacaaatttatgcatatacacgtacgttacaggatgaaaaagtcattgtaattagtaatatctcaaaagaggaagctgtgtataatgagggttcatttgcactaaaacgcaaacgtttgcttttaaataactatgaagttgcggaacatgaagaagtaacaacaattgctttaaaaccttatgaaacaagggtttatcgcatttcataataaaaaaggatgctctttgagcatctttttttatgaaaaaaataaatttctattgcaaagtgaaaacgcttttattaaaatagatttatgaaaacggttgcgcaaagataaaaataaagtaatataaggaatcgttttcataaagggaacagaaattataatttaaatcattatgttgttataaataaaggggaggaagaacagatgaaaattacgtcttttgatttttggcaaaagttcgggaaagctttattagttgttgtagctgtaatgccagcagctggtttaatgatttccatcggtaagttaattggtatgtctgctggggatgttaacgcagttcatacaatcgctcgcgtaatggaagacatcggttgggcaatcattacaaatctacacatcttattcgcagtagcaattgggggatcttgggcgaaagatcgcgcgggtggtgcatttgcagcgctattagcattcgtcttaacaaaccgaattacaggagctatatttggggtaaacgctgaaatgttagcggattcaaaagcgaaagtttcttcagtaatagcgggagatttaattgtaaaagattactttacttctgtacttggtgcacccgcattaaacatgggagtgttcgtagggattatcacaggtttcttaggagctactttatataacaaatattataactataataaactgccacaggcattagcattctttaatggaaaacgatttgtaccattcgttgtaattctttggtctacagttactgcgattgtattatcacttctatggccattcatccaaagtgggttaaatgaatttggtcgctggattgcagcttcaaaagatagtgcaccagttgttgcaccgtttgtatatggaacgttagagcgtttattattaccatttggtttacaccatatgttaacgattccgatgaactatacagagctaggcggaacatatacgatgctaactggttcaaaagttggacaagttgtagcaggacaagatccattatggcttgcatggattacagatttaaataatttactagcaaatggagatacgaaggcatataacgatttattaaataacgttgtaccagctcgtttcaaagctggacaagttatcggctcaacagcagcgttaatggggattgcatttgcgatgttccgtaacgttgataaagaaaagcgtgcaaaatataaaccaatgtttttatcagcagcattagcagtattcttaacaggtgtaacagaaccaattgaattcatgttcatgtttattgctccagtattatatgttgtatatgctattacaacaggacttgcattcgcgctagctgatttaattaacttacgtgttcatgcatttggatttattgagttaattactcgtacaccaatgatggttaacgcaggtttaacaagagacttaatcaactttgttattgtttcattagtgttcttcggtcttaactttacactatttaatttcttaattaaaaaattcaatttaccaacaccagggcgtgcaggtaactatattgataatgaagatgaggcatcagaaggaacaggaaatgtaaaagacggttcactagcaacaaaagttatcgatttattaggtggaaaagaaaatattgctgacgtagatgcttgtatgacgcgcttacgtgtaacagtaaaagatttagatgttgttgcaccagaagcacagtggaaacaaaatggtgctctagggcttattgtaaaagataaaggtgtacaagcggtatatggtccgaaagctgacgtattaaagtcagacattcaagatatgttaggtgcgtaataatatgaaattgctaactttaaactgtcattcttggcaagaagagaatcaaatagaaaagatacaataccttgctaaagtaattcaagaagaagagtacgatgtcatcgcattgcaagaagtaagtcagtccatacaagctgaaaatgtatgcggtaacaagaaagaagataattttggacttttactattagaagagttaaaagcgctacatgtaaaagattacaatattacttgggatttctctcatattggttatgacgtgtatgaagaaggattagcgattataacgaagcataatattataaaagaagatacgttcttcatttcagaaaacgaggatacaacgtattggaaaacacgtaaaattgtaagtacaacaattgcttataatggtaaggatataacgttttactcttgccatctcggttggtggaatgatgaagaagagtcattcaaaggtcaagttgatcgtttgatggagcgtgtagatagcaataagctcgccttcttaatgggggattttaataacaatgctcggttggaaggcgaaggttatgagtatatgatgcaaaaagggttgtatgacacatatgaattagcaatagagaaggatgaaggaacgactgtccaaggtgagattgctggttgggatgaaaataaacataatttgcgaatcgatctaatattgtgtaaccaaagtaaaaaagttcattcttcaaaagttatttttaatggtacaaacagaaatgtaatttcagatcatttcggtgtagaggttcaattggatatataatagaagaaatcctcacagagaataaaagctgtgaggattttttttaggaatacaagtatttccaagagaaaatacttgtattttttatgacatttcatatatatttgttattattgaatgtaaaaccgatttggtcattttgtattcatactttgactcacttcgttatataatgaagtaagtgaaagttaatgggaaaaaatagtacgtttttggttaatacacgatgtagaaagtgatataattgcaaaatgcatgtatcattttctaaagaaggaaaaatatataattaggtgataacttctatgaaacaaatttggcgtatttataagacagatttacggaatgtagccaaacattgggctgcaattgttattgttttaggattaatgattttaccatcgttatatgcatggtttaacattaaagcttcttgggatccatatggaaatacaaaagaggttcccattgcagtttccaaccaagatgcaggttctaatttaagagggaaagatattaatatcgggaaagagattgtagactcccttaagaaaaacaaaaatcttggctggaaatttgtagatgaaaaacaagcaatttacggagttgagcgtggggattattatgcaagtattacgattccaaaagacttctctgaaaaaattgcaactgttctggatgaaaatccgaaaaaaccagaactggattactatgtgaatgaaaaagtaaacgcgattgcaccgaagattacagcaaaaggtgcatcaggtattacagaagaaattagtaaaaactttgtaaaaacagcaaacggtgagatttttaaaattttcaatgaccttggaatcgatttagaaacaaacttaccaagtatcgaaaaagtaaaagatcttgtatttaagttagaagcgcagttcccagaaatgaatacacttatggataaggcgttagatgatgcaactcgagcagaagatgttgtgaaagtagcgcaaaaagagttgccggttgtagagagtgttatgaatgatgggcaagaggcgttagggaatttagataaattctttgcgagaaatgatgaaacattgaatcgcgctccgggaactattaaaaataatttaacagtaatgcagcagggattggatgctgcagcgaaaattacggattacttaaaaaatccggcatttgactttaatctgacattgccagatccagctaaattaccagtcttacctaatataactattccacaaataccagagattccagcattaccacaagtgaatggtgaagggtataaaaatattgctaaaaatattgatcaaactgtaaacactgttttcaattctactcgtgttggaacggcatatgtaaagagtgttatggatggccttcaaaataaaggcgtggatccagctgtagcacagaaaaatgtgcaggatgcttcaaagctcctccaagagcgtatcgatagtgtttcatatttgattgatttctttacagctttcaaggaatcagcttccacggaattcggtaaacagttctttggaaacagagtggaaagtttaacggtgcttaaaaattctatggtggacgctaacaatagggttaagcatgtaggagatttaattagttccggacaagaagttaaacaagatgtgcgagatgctgtaaatcaaaaattagatgcagtaaataatttagtaaatcaagctgaaaaggattataatgcaacgtttgtagctgattttgaaaaagcagtaagtacagctgagcaactgaaaagtaaggctgaaaatgcgcaagaaaatgcacagcagcttagaggcaatttaaatcaagatataaataaggctaatgagatattaaacaatggtagagagaaatatgataaagctgtaaatgattacagtagattaaaaacggagcttgaaaaagcaagagaagacttaagtaacaaaggtgttaacggattagattctacaaaagtagccttaaatgatttgaatgggcagttcaaagcaagttggaatttagttaatgacatgattccagttctggaaagtacaaataaagtgttagctgatgtgaatagtgataaaaatcttaatggtacaatttctaagttaaataaagcaaaagatggtttgcaaaaaggaatggatttaactgataaaggaattgacgctattaataaaggtcaaaaaccagcagctgatgttattgaaagtattaatcaagtgtctaaaagtgtttcgggccaaattggtgacattttagctaaatatgactcagaaatcactccaaatttcaatgcagcaattgctcgcacaaaagagatgtctaaaaatacatctcaaattttaaaagaggcagacaaaaagcttccagatgttaaaaaattactagaagattcatcaaaaggtttagtagatggtaaaaagaaattagcagacattaaagctgaaatgccagctactgagaaaaagattaaagaattagcagataaaattcgtgattttgaatctgaagaggatttaaaagacatcatacgcttattgaaaaacgatgttgagaagcaaagtgattactttgcgaatccagtaaatttaaaagaaaataaattatttgcgatgccgaactacggttcagcgatgtcaccattctatacagtgcttgcattatgggtaggcgcattattaatggtttcattattaacggtagaagtacacgaagagggcgcgaattataagagccatgaaatttacttcggacgtttattaacattcttaacgataggtctttcacaagcgtttatcgtatcgatgggagatatattcttactcggtacgtacgtagtcgataagttctggtttgtgttatttagtttatttattggtggagtcttcgtttgtatcgtatactcactcgtttctattttcggaaacgttgggaaatcgatggcgattattttacttgtactacaagtagcaggatcgggcggaacattcccaatccaaatgacaccagcgttcttccaagcgatttatccgttcttaccattcacatacgcaattagcgcaattcgtgaaacagttggtggaatgctttgggatatcgtaacgcgagatttacttgtgttaagtgctttcgtagtagttatgattgttgctgcgttattactgaaaacaccaattaacaaatcaagtgaaaaatttgttgagaatgcaaaaggaagtaaaatcattcactaaaataaaaggttcctaccgatagaggtaggaacctttttgtttaatcaaattttaatttttttaatgcttccgcgaatgggttatttaatggttcttcttcttttttctgttgtttcatatatttttgaacgtcgcgtttatcggctttgtttccagattcttttttacgtcgctcttggaatgttgataatttctcgcgatagccacatttacatgcgaaaatttggcctgcaccctcaccacgtaattctagtttctttttacattgcggacagcgagcatttgttgtacgagatacatttttacgatgaccacattcacggtcttggcatacgagcattttccccttttttccatttacttctagcattggtttaccgcaatctggacaagacttcgttgaaatgttgtcatgtttatatttcttatcactcgatttaatttcagcaacaatttctttcgtatagttcttcatttccgaaatgaatacttctttctttaattttccttttgcaattgcttcaagtttttgttcccactcaccagttagtgtaggtgattttaattcttctggtactaaatcaagtaattgacgaccttttgatgtaatgtgaatatctttaccacgtttttcaattaagaaagaattgaaaagtttgtcgataatatctgcacgtgtcgctacagtacctaatccaccagtcgattttaacgtatcagcaagttgtttattttgcgtatccatatattttgtaggattctccattgctgaaagtaaagttgcttcattaaagcgtgcaggtgctttcgtttgacctgatgtttgcataagtaactttacagttaatgtatcgcccttttcaatgtgaggtagaatctgctcttttacgtcatcagttacatcatcgtcttcaaatcgattttcgtatacttccttccaaccagcatgtaaaatcgtttttccgcgtgcaatgaatgtttcattgccgacctttgtgcgtaacgttagttgttcgtattcgaatgctgggaataaaacagctaagaaacgttttacaactaaatcataaattttgcgttctttatctgtgaatgctgcgaagttaacgtatccttctgttggaataatcgcatgatgatcgcttactttactatcatcaacaaatgatttgttaggtttgataggcttttgtaatactttatgtgcgaagggacggtattctccaacaccacatgcttttagacgttctggaagtgttccaacgatatcagatgaaatgtagcgtgaatctgtacgagggtacgttagtactttatgctgttcatacaatttttgcataatatttaatgtttctttagcagagtaaccgaactttttatttgcatcacgttgcaattcagttaaatcgtaaagaccaggagagaatgacttcttctgtttcttatcaatttccacaacagtagcattttgtttatctaaactttttacaataccatcgattttttctttattaaaactacggctattgccatttgcatcttgccaagtaagtttgagcttctccattgtttgagcttcgatgccgtagtaagtttgagctttgaagttctttatttcatcctcacgactagcaatcatagcaacagtaggggtttgtacacggccgcaatttaactgggcattaaagcgagtcgttaaagcacgagttgcattaagaccgatataccagtcagcttctgaacgtgcaactgctgaagcgtataaattgtcataggctttacctggttttaaatttgcaaaaccatctttaattgctttatcggttacagaagaaatccataaacgtttgattggtttatttagcttaactttatcgataatccagcgtgcgactaattccccttcacgtccagcgtctgttgctacaataatttcatttacatcttttctaagtagctgactttttacagcattaaattgtttaccagtttgtttaataaccgttaatttcaaacgctcaggtagcatcggtaaatcttctaaattccactttttatatttcacatcataactttctggatctgctaatgtaacgagatgacctaaagcccaagttacaatatatttactaccctcaagatagccgtttccttttttatcacacttcagtacacgagcaatatctcgtgcaacggaaggtttttcagcgattacaacgctttttgacatattaaaaacatcctttcaaatttccataagttaaatatagcatacatcttcttgagattcagtttcgctccatatttgatcggtttttagtgggatgaacaaaacactcactgattaaagtttcacttgattatgtttattgttatataggttgcttctatattaaatagaaaagtaaagaacttgttattttactagaataagagtagactttgaagtagatgaataataagcacatgggagtttgtggatacaaactgagagtatgactactagtccgtcattgaccatttgaacctgttggataatgccagcgtagggagagtgtaaaagcacatgttcaggcactttgcgtacgcgcaaagtgtctttttgtgtatctcccatcattatagttaggagatgaaaaggatgaatatgaaagaaattagtaaagtagtggatttggtgagagaatctaatccgctcgttcataatattacaaatgttgttgtaacaaattttactgctaacggtttgttggcacttggggcatcgcctgtaatggcgtatgcaaaagaagaagtagcagaaatggctagcattgctggagcgttagtattaaatatggggacacttcgtcctgaagaagtagaagcgatgttacttgcgggtaaatcagcaaatgcgaacaatgtgccagtactatttgatccagttggtgcaggagcaacttcatatcgaacagaagttgcgagacatattccggctgaaatcgatttagcaattatccgcggaaatgcagctgaaatagcaaatgttattaatgagaaatgggaaattaaaggggtagacgctggtactggaaatggcaatattgtaagtattgcaaggcaggcagcagatgaactaaatacagttgcggtcattactggaaaagaagatgttgttacagatggagagagaactattgttattcgaaatggtcaccctattttaacgaaagttacgggaacaggttgtttactaacttctgtaataggagcatttgtagcagtggaaaaagattatgttaaagcagcagtagccgcattaacgttttatggtgtagcttcggaactggcagctgctaaggcggtagaaaaagggcctggtagtttccaaattgaatttttaaatcaattagcgaatacaacttcaggtgatattgagaagtatgggaagattgtggagttagagtaagagggagtgaaagaaatggcacgcattgaaatagataaaatgtctaagctattgcaagtgtattttattatgggaagtaataactgcacgagggatcctttagctgtattgaaagaagcgttagatggtggagtgacactttttcagtttcgcgagaagggggaaggttctttaatcggagaagatagagtgcgctttgcaaaagaattgcagacgctttgtaaggaatatagtgttcctttcattgtaaatgatgatgtagaattagccattgaattagatgcagatggtgttcatgttggacaagatgatgaaggaattacatctgttcgtgaaaaaatgggagataaaattatcggcgtatctgctcatacaattgaagaagcacgttttgcaatcgaaaatggagcggattatttaggtgttggtcctattttcccaacgagtacgaaaaaagatacgaaagcggttcaaggaacgaaaggattagcttattttagagaacaaggaattacagtgccaatcgttggtattggtgggattacaattgaaaatacagcggcagttatagaggcgggtgcggacggtgtttcagttatttcagcaattagtttagcggaatctgcgtatgaaagtacgagaaaattagttgaagaagtaaagagaagtttgtagggaaggaagtgtagtattttaagtgctacatgaagaaatagactgcccaaaatttaaacaaatatttgattaaaaaagcacaaacctttttaaataaaggtttgtgctttttctttaaaacataattgaaattaagagcattccaatgccgatagaagtaaatgttgcaattaggcccggaatcataaaactatgatttaatacgtatttaccgatacctgttgtaccagtacggtcaaagttaatggcagcaacgattgttccatagtttggaatgaagaaatatccatttactgcagggaacatcgcaatcagtagcgctggtggaataccaagagatagtccaagtggcattaaggcacgaactgttgctgcttggctgtacagtaaaatagatagaatgaatagtgcgatagcaaatagccaaggtgcacttgttactaaatgctgaatcgatccttgaatcatatttaagtttccattaaagaaagtatctcccatccaagcgataccgaaaatagcaacaactgctgttgctcctgctttaaagacgttaccagatacaatgctttctacatttggtttacagaaaataataataagagccgcgatagttaacataaccatctcaattgtgttcggcatggaaagacgggctaacttcccatcaactatccatcctggacgaagtgcttcaaatgaaccaagaagtacaacaaggaaggttcctacaaggaaaaggataactgataattttgcgccctttacacctacaaattcttttttctcttcaagcttaggaattaatccttcttttaatcgttttaagtattcagggtcttcatttaattcttttcccatcttactagcaacaaatgcagctatcatacaagcgatgaaagtagaagggatacttacttttaaaatatctaataaggtgattttatagtcagctaacattgctaaaagtgcaactgttgcagctgatataggactagctgtaattgcttgttgggaagcaattacggcaattgacattggtcgttctggtctaattccggattcgcgagagacttcagcgataacaggaagtacagaataagcaacgtgaccagttcctgcacaaagtgtaaataaataagtaacaattggagcaaagaatgtaatgcgttttggattttttcgtaatgccttttcagctagatgaacaaggtagtccattcctccagcggcttgcaaagcaccagcagctgtaattactgccaaaatcataagcattacatcgataggaggcgccgttggttgtaagtggaagacaaaaacgagtattgccataccaactccacccattactcctaaaccaactccgcctaggcgtgcaccaataaaaatacagagtaacaaggtaagaaattgtagccaaaacatgataaactacctccgaaattcattagttaagatatattcgaatagtttaatttgaatgaaaattaaataaatacccgaagaaatccttgttatttatacattttttattatataacataaaaaaagtaacattcacgtactttttgaaattattttgaaaaagcaattcattaaaaatttgtatttatatctctaaataagtagacattttgatttatatgttgtaatctttgaaagagaataaattaattctcatagaactcccatatcgttcaactcgttcagcgagaaaggcaaactgatggaaacatgaggacgcaaaactacaggagctaaggtcgaaaggctacgctagccagttaccggacggatagggttggtcttggccaatgcttttacattggcttttttttattctcgaacatattgagaaacattttcaaacaaaatattcatatattttgttttttttgtttatgttgattaaggaaggtggatattaatgaaaaaatattggcataagttatcgttccttcaaaagaacgtcttattaaccgtattagttattttgacacttgttggaagtatgggtgcattaagttttaacatgtttcaaaatagtatgatgtctttatttgaaaggcagtctattgaaacaggagaaatagtattgaaaaaactggatgtagaattagttagagacatggcgaaagatcctacagccgaaaaagtgaaaaaagaaaagttaacagagaaattagatgaagtatcaaaagaattgaaaagcgttggacaaacgtatgttacaggagcaaagccgaatgaaaagcgagaattacaactcgttggtttgactacagagttaacaaatgcgtttcctataaagccgggagattattatgaacaacccgctcattggatgaaggcatacgataaagtgattgatacgaaaaaggctcaaatgacagaagtatatgaagatgaaataggttcgtgggtgacaatattagaaccaattacagatggagaaaacaatattgttgcaattattgcggctgacttagatgcttccattgttcctattacaaaagagaagtttatgatacagggcttactcttcatcattatttcattagcaattgcgactattactcaattctttatcgtgcgtcactcgctagctccattaaaagatttacgagaagggttacgtaaaattggtgaaggtgacttaagtattaaattaaaagaaagaccagatgatattggaattattaatgtttatttcaataacacaattgaaaaatttaaagggattatagataaagtaaggcaaactgctgagcaagtttcttcttcttcacaagaattgtcggcgagtacagaggaaaacagcatggcagttcaagagattgcaagttctattgaaggtttaagagtaggggcacagtctcaaaaaacttcagtacaacaatgtttaggaattgtacatggaatggaagataaggtagaagaaataactggggctgcaaaacaagttgcggttgcttctgaaggtatggaacaacattcaattgaaggtaatgaagtgattggacaaattattaatcaaatgagtttaatccaaaatgcagtacaagatttatcttccatcatttattcgttagaaacaaggtcaaaagaaattagtgatatcgtaactgtaattacaggtatttcaaatcaaacaaatctattagctttaaatgcttctattgaggcttcacgtgctggagcagctggaagagggtttgcagttgttgctgatgaagtacgaaaattagcagaacaaacggaagcgtctgcaaaagatatagcgaaattaattggtgaaacacaagctgagacagaagatgctgtagtttccatgcaaaaaggttcaaaagaagtagaaactggaatttcgcttgttcaaagtagtggagatttctttgaaaaaatctcaaaatcagcgcaatctgttacagatcaagtaaaagctgtttccggtaattcgagtgacattttacaaaatagccagaatattgttcaagtcgtaaatgaattatcacatattgcaaatacttatgccaacagcagtagtaatgttgaagaaagcatgaaagagcaagaaatatcagtacaagatattgcagaattagcgacttctttaagttggctttctcaggaattgcaagagcttattggtgagtttaaaagcgaataaggagaaagttcaattctaatcaaggggggtatctccgctactgattatgaattgaacgaatctgccctttaataagggatgaaaaaggtgtgaattttcacacctttattatatttaagagaggaatttacataaatatgaaattagtgatttcttataatgagatgataaaagaatttttaggaaaagtagaaggaagtattaaaatacctaaagatgtgcacggaacagaacttaggataaaaaggaaaacggaactgttttcaaatttgactcacattgtagatttaataggagcgactgcaacgtggttatatcatatttctaaagaaaaacatattgtcatgctttatcatgtaagaggaaatttatttccaattactattgaagtttctaattttctctcctatgaaagtttaaatttacaaattgaagagcaactggagcaaattaaagaaatgaatgaggaagaaatagaagagtttcaaaacggtaatacattatatgaaatgtcacctattattattggtgaaacatattatgagctacaagacacgaatacattacaatttgtatttagtaaaaatatgcaaagtgtagaaataatatttaatagtgttaattggaaagagacaacgattactcgttatgcacaacaaatacaaggtgttttagttgatatatcacaaaatactaataagtatataaaacattttaatattattacagaggccgagatggcactttatagtcaagtgaatgatacgacagcagtatatcctgagaaaagtatcgtcgatatgttctataatactgttactcaatttccaaatcgtatagctttatcttcaagggaaggtactttaacttatgaggagctaaataaaaaaagtaatcaaatagctcatatgttaattaaaaacggcgtccaattaggagactatgttggaatatttatgaaacgtagcatagacacagtagtaagtatggtagctatattaaaagctggtgcagcgtatgttccgattgatccagattatccggaaagtagaatacagtacattattcaagatagccaagcgaaagttatattgatgaaagagacgcctataacatgtgatggggttcaaacagtttcattgtatgatagtgaaacttatgaagatatagatgtaaagttgtctattcattgtgatgatgtagcttatatgatttatacatcgggttcaacagggaatccaaagggaacgatgttagcacatagaggcgttgttaatctgtacacttggatgaaaaagcaatatgaattgacagaagaggatgtatttgctcaatttccttcctttagtttcgatgcttctgtatgggagtcatttgcttctttattctgcggaggaaacttgtatgtactattagaggaagagcgattgtctgtagaggcatttgcaaatgcaatctataaagtgaaagcaacttcaatcttggcattagcaacaatttttgttcgacaagtagcaacttatttagcagaagaagatatatataagctagcttccctaaaaagaattgcgattggtggtgaaatgttgcctgtagaggttattaaattgtggagagaaagaataggtacaaatgttgaaatttataatgtatacggaccgacagaatgtactgtagtgacgacaacctataaaatacctagtcagttaaatgaggatgttgcgagtattcccattggtaaaccatgtgctaattatcaagttatgattttggatgagaatatgaatctttgtccaattggtgtacctggtgaattatatatagattcagtgggattagcaaaagggtattttaataagcctaataaaacaattgaagcttttattccgaacccttttaatcctatagttaatatatataaaacaggtgatatcgttaagttgctagaggatggaaatatagagtttttacatcggaaagatgatcaagtaaaaattagaggacatcgtattgaactaggagaaatccaaagtaaaatttctcaaaatcataatataaaagaaaatgctgtttttgctaagaagagtaaggaaggtagccaatatttaatcgcgttctatacaactttaaataaaaaagaaataccagaattagtttatcagttacaagagcaattaccagattatatggtgccatctaaactaatttatattaatgaattaccacttacacctaataaaaagattgatgttaagaagttagctcagttagaagaaaagtatgaaccggttcggctacaagaatatgttgcaccttctaataaagcagaaaaacaaatcgcgaacgcctgggcggaagtattaggaatttcaaaagttggagtgcatgatgatttctttacaattggtggacattcattaaaagtattacgagtcttaacattgttaaaagaagatttctcacatttaacaattcaagatttctttaaagaaagaacgatatatggattagctcgaattgagcgagaagtaaaagtagagaaagaagaagtatttcgtgaatataaagtgattcacgagccagatactatcacgtatgcaaacgttttggaagaaatccagatttcaaatgtctttttaacaggagctactggttatttaggatcacacatattatatgaattgttgagagatacatctgctactatttattgtttagtaagaccaaccaaagatgtgcagcaaagaattatagatacattaacaggctactttaatgatatatgtgaagaatggttacagcgtatacaggccgtagctggtgatctgggagaagagtatcttgggatgagcgaagaagaatttatgttcatcagttctaagatggatacgataattcattgcggtgcagatgtaagacattttggagatgtaaaacaatttgaaaatataaatgtccaaggaactagccgtatgctagcattagcggagaaaggtgctacattccattttatttctacaattggtatcccgttagaattagcggtagatcaatgggatacatacatgaaaactggtgattttaattacagtgtagacttagagaatgtatattcaaatagtaaactacaagcggaaaacattgttcgtgaagcaatgaaaaatggtttgcgcggaaatatttatcgtgcaggtaatttagcatgtcattcagaaacaggttcgttccaacaaaatattgaaggaaacgcattttatcgtcttattaaaacaatgctattaattgggaaagcaccaaatgtgaagtggaaagttgatttcacaccaattgattttgctagtaaatcaattgtatcgtatttacaagatgcgcaaattgtaggagagacgttacatatttgtcatccacatcaaattgagtttgaacaatttatacagctaattggagagtgtggatacaatcttgaaatggttccactttcagaatatgtaaataccggacttgcattagcgaagggaaatgaagtaatagcagagttaattgcttctcaagttgcaggagatggagcacagcaatctgaaattgtaatgggtacgcgtagaacgaatgaatggattaagaaaaaagaattgatagtaccagcaattaataaagaatttatacagcagttattagctcatggtgaaaaagttggttattttccaaaaataatgaaatgattatgcatgcttttgtttgttcaataaaataaatcatgctacaatgaaaacgaattaaggaccggggagccaattggctgagaggatgtaagtaaacatcgaccctcaacctgatctggataatgccagcgtagggagttacttaaagtgatgtagcatatgttattctgtaataacttgcatacaaggctttcctacgcagtaggaaagccttttcttatttttgaaatttaattttataagggggattttattatgtcacaacaagttacaatgtcattttcagtagtaccacaagcgaaaacgaaagatgtatattctgttgtcgataaagcaattgaagttgtgcaacaatcgggagttcgttatgaagtaggggcaatggaaacaactttggaaggagaattagatgtacttcttgatgtcgttaaacgtgcgcaacaagcttgcgtcgatgctggagcagaagaagtgattacttctattaaaatccattatcgtccaagcactggtgtaacgatagatgaaaaggtttggaagtaccgtgatgaatatgcaaaaccagaagcaatctaaacttattacaactatttggcttatccttctcattgcgatatgggaaggatctgtttcattatttaaaatcgaaccgtggattttaccaaagccttctgccaatgttcaagaattaattgggatgaaagatttactattaccaaatacgatgcaaacactgcaggaagttataattggactattctttgcaattttattggggacgagtatcgcaattattatggacgttataccgttatttcgtattttaataaatccattgctcgttatttcgcaaacaattccaattgttgtacttgcaccgctatttattatttggtttggatatgggatgttgccgaaagtaatggtcgtaatactcgtttgtttcttcccaattgcgcttagtattttagaaggttttcaaacagtagataaaaatatgctgaaactgttacaaacaatgaaggcgacgaaatggcaagtttaccagaaagtaaaatttccagcagtgctcccatactttttctcaggtttaaaaattgcagttacatatagcgtaatgggagcaattatcggagaatggctcggtgcaagtgaaggattaggcgttatgcttacgagggctacaaaatcctttttgactgcccgagtatttggtgttgcagcaatcatcgttatggtgacattatgcctgtattttatcgtagagtttatggcaagaataacagcaccatggatatatagaaaggacggcagaaaatgaaaaaaggtttgaaagttatgttagctgccttagtagcggtaggtgtggctggatgtaatccggcgaagaaagaagaaagtgcaagtaaagatcaaaaagtaaaagtagtattagattggtttccaaatacgaatcatactggcttgtatgtagcgaaaacgaaagattattacaaaaagcaaggattagatgtagaaattattcaaccaggtgacaatgtaacagcagagcaaatgatagcatcaggaaaagcagacttcgcaataagcgcacaagaaaatgtaacgttagctcgtgtagaaggaattcctgttgtatctgtaggagcgattattcagcataacacttcagcgtttgcatcgcttaagaaagacaatatgacgtcaccgaaagattttgaaggtaaacgttacggcggctggggaggaccagcagaagaagcgacattaaagacgattatggataaacatcaagctgattttaataaagttgaaaaaatcatcttaggacaaacagatttctttaaatcaattggccgtgatgcagatttcgaatggatttattacggttgggatggtattgaagcgaagcgtcaaggaaaagagttaaatacgattatggtgaaggacttagatccagcgcttgatttctatagtcctgttattattacgagtgaaaaacatacgaagcaagataaagactttgtgaaaaagtttatgagtgcaacgacagaaggttataattttgcaattaaggaaccgaaagaggctgctgatattttaattaaagctgttccagatgtgaataaagatttagttcaagaaagccaaaaatggttaagtacgaagtatcaagatgatgctaaagcatggggagtacagaaggaagaaatttggacgaattacatgaatttcttatatgacaacaaagttattaagaagaaaatcgatgtaaaagatgcttttacaaatgaattccttccaagtgaaaaatgagcggattacaaataaaaaatatagtgaaatctttcgacggaaaaaatgtattagagaatattagtgcctctatacaagagggagagtttgtttcctttgtaggaccgagtggttgcgggaaaagcacattattaaacatgattgcaaatgttgaaaaaccaacaaacgggaacgtaacgtataacgataagcaagtacaagaacaagatgttgttagttatatgccacaacaagatttattgctaccgtggcgatcagctttgcaaaatatcgttcttccattggaaatcgaagggaaaccgaaaaaacaaaggctaacagagggaatggaagcattaaagcagttcgaactagatgaatatgcagaccattatccagatgaattgtctggtggtatgcgtcaaagaattagttttctgcgcacatatttatgtgaaaagccaattatgctacttgatgagccttttggtaaattagatgcatttacaaaaatggaagtacatagctggcttttaaactcttggcatcaagagaagcaaacaatcgttatggttacacatgacctagatgaggcaatcttgctttcagatcgcgtatttattttatctcaaagaccagcttcaatagttggcgaggtacaagtgaaattacctaggccgagaacgatggatatgttaacatcactcgaattaaaaaaggataaagaagagattttaagtgtgttagctccttatatgaaaaaatagaaaaagctgatgttttaattttagacgaacggactaatcatttggatgtagaaactaagatggctttataggaagcattacaacaatacaaaggaacggttttaattgtctcacatgagccttctttctatgaatcgtggataacaaaagtatggaatatagaagattggaatgctgaacaatatgaataaagaaaaggcattagcttttatgagctaatgccttttctttgtgattaacatgattttcgagaactcttacatgagaattgtatgaagaagcactcttatggtgcgcttataagcgtgctttttcttttgttatatttataataatacgaaagcctttccctaacaggtgactatctttctttatatatatagatagttcaaaatggaatgaaaataattcctttatgtaaaggataatatggatattataggaagacaatagaaattaaaggaaatccatgtaaaattcaaatgaacttcatataaacttcatattagaaactaaatataattataacaagttattgagatgtttttgatttttcataaaattaaaagtttgaatttaggaggtattgctcaaacctaaattcaaacttcagtgaagtaattaatggatattacgtctagttttcgctaatgacggcatttaaaagttcggcaggattacctgttcctgcaccgccaattgtaatagatccaccaggaggaatttcaccattccatcctgcgttcgtaattacataatgattatttgttttactactaattttagaatcccaaacttgtgttaaattgccgctataatcaaattctaatttccaatttttaatagggttcgttccattatttttgattataatcgagaagttataaccgctgccccaattcgaagtgactgaaaatgtagcagtaccatttccatcaggaggtgtcgtattagcttcatccgttttgacagtaagagcggtaggttgtgatttatttccagcagcatctttggcaattattgaaaatttgtattccgtattaggttttaagtttttaattgtaatgctatttgttgttgtactccatttctcttctccagcagtaatttcatattccgtaactcctacgttatcagtagatgcagtccagtttaattgaactgagtttgaatttttattcgtaactacaatgtttttaacattcgttggtggctcagtatctttttgattaataggtccaccaagtaattcttttactagcgtatcaagtaattttggaccactgcaactatattttggacttgtacggcaatctccgcttagttcccaaaacattgctccacttaaacctttcgtctttatatagtctgttttgtatttcatagattcattgtcatcgtagctaataaatgtgcctgtagttgcattatataagtaaggtactttagctgtgtcattccagtagcgtacaaaaccatttttattaacgtaattggctgctaaatcaccgtaatcatagacacctgtgtcaccggtagagtaatcatcccaagtacctttagaagcaagtttcccatcactacctggtttgcaaggttgatattgtccgttattttctttgccacaacttttccagccacgtccgtaaaagggtacgcctaatactagtttatcgactggaacaccttcatttgtataaacatttatagcaccatctacgtaaaaattcgtatttgctgctggatcatttggatccttatatagagctgcattatgattagaagtagcttcccatccgccgtggaaatcatatgtcataatattaatccaatcgagtatttgagaaattttctttagttctgtatgatcagcgtagcgttggcttgcacctgaagcgattgttagtaaatattgtttgccatcttcagcacctgctttattcaaagcatttcggacgtcttgaagaaggagagtgaaattttgtttatcttcaggacgataactaccaccaggaatcgtttcaacgcccggatattcccagtctaaatctacgccatcaaacccatatgcgcgaagaaaagctactgtagattcagcaaatacttttcttgttttttcatcagcggccatatcagaaaagcggttagaccaagtccagccaccaacggaaataattgtttttaagtgaggatatttagcttttaatcgttttagttccccgaaatttccgcaacgggcatatttatcgcaatcttcccaagttgtccctgagccaggatacgatttggtaacatcagcccatggttccccgagtacgagagtaccattaggaacctctttattttgcaatggtacaccagattctttacagttccacgtttgtttatttggattatcaggatgagtagaagggtttccatgttttccattccaacaaatatccgcgaaagcatagttaaggtgagtaagttttgatgcatcaatgtcagcaacttgataattacgtccgtaaacgccccacgaaggaaagtacccaacaattttttgactttgctttggtgaatctgctaatgcgagatttggagtaataaaatttgtgagaaaaagaggtaagaaaagtagtagggatagtaatagcagtgtgaatttttgagacctcatagccatttctcctttcaaaataaaagatatatttaaaggcatacgccaataaatcaaaatgaatctagacgtgtgaaacgtctagataaaatgatcagacatcacgaagtctatacaagggagctgggggtgattaaatcgtaacaaatgtaagatttagtgtaaacgctttattaagttgaaaaagactttctcaatacaaaaaggcttgaatacaaactatatatgaaaacgaaagattggtatgggaggaaatagctcattataaataaatttgagaaaaaattgtatggagccaattattaaagacgtagaaagataaggaaatatcatgtaaaataatagtaaaaatatgtaaaggagggaatagtgtggatgtgtttttgaacattgctgaagaaaaaattcgacaagcaatacggaatggtgatcttgattatcttccgggaaaaggaaaaccactacaattagaagatctttcaatggtacctccagaacttagaatgagttataaaattttaaaaaatgcgggaatgattctaccagaaatggaactacaaaaagatatattaaaaatagaggatctaattgcttgctgttatgatgaagcagagagaaaagaattacaagaagagttaacagcaaaaacgcttcgttttcagcaggtaatggaaaagagaaagattaaagatagttcagcttttcgtatgtatcaagacaaagtatttcgtaaattacgctaagagggataagatgactacatttaaaacgatagaagaattagcgacctatatcgaagaacaacaattggtacttctgtttattaaaacggaaaattgtggtgtttgtgatgttatgctaagaaaagtaaattgcgtattagagaattatgattacgtagagaaaatagagatattactacaagacatgcaggagattgcggggcgatatggagtatttacagggccaacaattttattatttcataatggaaaagaaattcttcgtgaatcacgcttcatttcacttgaaaatctagagagaaccattcaattattcgaggaataagggaggcttttaaatggaatttattattgtcatactattatttgttgtagttggaacaatcgtaacagcagttcgatcgaacaaaaagaaggtaaatcttacaaaacaaaataacattcataattcatctaacagctcatcaccattatttttctttgctggatctgataatgatagctcgcatgatggcggctcacatgattgtggaggatcttttgggggagatagcggaggaagctgtggtggcggtggtgattgataaaaatgcgccttatataggcgtatttctttttaaacaaacgtttgattagtcggcttacatatgcataaacacagttaaacaaacgtttgattagtcggcttacatatgcataaacacagttaaacaaacgtttgattagtcggcttacatatgcataaacacagttaaacaaacgtttgattagtcggcttacatatgcataaacacagttaaacaaacgtttgattagtcggcttacatatgcataaacacagttaaacaaacgtttgtttaatatttttaacatactaaggggaatggaaatgaaaagggaaccgaaagtgaaaaataaggggaaagtagtgttatttttattagctgcgggaggcgtatttcttgttaaattagcatttaaatttggaaccatacatatgattcgaacttggtttgaaagtacgttttcttaaataaggaatatagcctcttgcgatagaggtttttgatttgttattattagactgaacggtcggtttaaagaggtgtgaatatgagaagaagcgcagaagagataaagaaagaaattgcatataaagcagaaagtctattttcacagaagggctacgcagctacatctatggaagagatttgtgaaattacagagcgaagtaaaggaagtatttattatcactttaaaagtaaagaagaattatttttatttgtagtgaaacagcatacgtatgattggattgaaaaatggaatgaaaaagagaagttgtatagcactagtactgaaaaactatatggtctcgcggaatatcatgtagaggacatacagcaaccaatttcaaatgcaatagaggaattctctatgagccaagttgtaagtaaagagattctggatgaactgttagctttaactagagaatcatatgttatgtttgagaaattaattgaagtaggtatacagtctggagagttccgtgaagataatactcgtgatcttatgtatattgtaaacggattattatcaggacttggagtgctttactacgaattagattataaagagctgaaacgtatttataaaaaggcaatagatgtattgttaaaaggaatggcagctgaataataggtcagttgcttttcttacaaaataaattagaccgaacggtcggtttatgaaaggggaatgaaaatgaacgctttatttaaaaaccgagcatttatgctcgttatggcgtctgatattttacaacaatttgcaatttggatcagaaatatggctcttttgtattttataatggagcgaacgaataatgatccagtttctgtttcgttgttatcagttatggaatatgcacctatttttattttctcgtttatcggtggtgcgctagctgatcgctggaatccgaaaagaacaatggtcgctggagatgtattaagtgtactgtctattataggaattgtcttgttgttaaagctggattattggcaggctatattttttgcaacactcatttccgcgattgtaggtcagttttctcagccctcatcttcgcgtatatttaagcgctatgtaaaagaaggagaggtagcaaatgcgattgcatttaaccaaacattacagtcattatttctgatttttggaccagtggtaggatcgcttgtgtatacacaacttggtttatttacatcactatatagcttaatcattttatttttgttatctgctatcgccctttcattcttaccaaaatgggttgaaaaagagcaggtggcgagagactcattaaaaaatgatataaaagaaggttggaagtatgttcttcatacgaaaaatttacgtatgattacgatcacttttacaattatgggtttagctgttggattaacgaatccattagaagtatttcttgtaattgaacgtttaggtatggaaaaagaagctgttcaatatttagcggcagctgacggaataggtatgttactcggtggtattgttgctgcagttttcgcttcaaaagtgaatccgaaaaagatgtttgtattcggtatgggtatattagccctttcatttttagtagaagggctatctacatcattttggattactagtttcatgagatttggaacaggtatttgtttagcttgtgttaatattgttgtcggtacgcttatgattcaacttgtaccagaaaatatggttggaagagtaaatggaacgattttaccactgtttatgggggcaatgctaattggaacttcattagctggaggattaaaggaactaacttcactagttactgtgttttgtatagcgatggcacttattttattagcgatagggccagttgtacgtatgcaaataaagaaagaagatatcgctaacaaagaggcactaacaaattcattagcttcaaaataactattgtaagggagcaatattgctccttttttctttgaggaacttttgacaactatatgagccaattatatactgatgttgtaaaaacgattttacaggttaggagcaatggtgtgaaaaatcaaatctatgaattacgcactgaaaataatatttcacaaggcgcattagctgataaatgtaaggtttctagacaaacgataaatgcaattgagaataataaatatgatccaagcttagcgttagcgttccgtttagctgaagtattaggaacaactgttgataaattatttttgtacaagcagtagagtcgttcattataaggcgcacctttaaaaataaaaaagatcctcttcttatgagaagaggatcttttcttatagcgttttagtctttggactaggtggtgtaacggatgtattattttctggaactctagttagtaagaatcctccgataataaatagaacaataatactaagaacaccagcgtttgtttttcctgttaattgcgttgtaacaccgactaataccggacccataattgcggcaaacttcccaaatatattataaaatccgaagaattcattagcagattcttttggtactagttttgcaaagtatgaacgacttagtgcttgaataccaccttgagatgtagcaactaacattgctaaaatccaaaaatcaagtgtcgtttttaaaaaataagcatatgtgcaaataatgatataaataatgataccgacatatagcatttttttgccagtaaatgtttcagataattttccgtatagtaaagcaaatggacaagcgacaatttgtgttacaaataatatgattaatagattcgttgcactaataccgagatcggttccgtaagcggtagacatagtaataattgtatcgactccgtcaatatagaaaaagtaagcgattagaaacataaatacagttttatattctttaatatttttaaaagtatcagcaagacgtttgaagctcattctaataggtcttggatgacgctcaatatagtgtgtttgctctacgttttttagcattggaattgtaaataacccccaccaaagagctgttattgcaaaggaaatttgactagcaatgccgaccgataagggaatagttcctttttgagaaagaataataagagcgatacaaccgataaaaggaattgtactcccgatataacctaatgcaaatcctcttgtagaaattcggtccattctatcttcagaagtgacgtctactaaaaatgcatcatagaaaatgtttgctccagcaaagccgattaaggcgagcatatagcaccctagcaataagtaccactgagaggttggaacgactgctaacatacttgtaaatacgataccgagtccaaagaagaatgtgaaaaaacgttttttaaatcctttataatcagcaactgtgccaagaataggagcaagtatagaaattaaaagtgttgcgaatgagtttgcatatccccaatatgctgttgaagttgccccagatagtccagcttcttttgcagctgctttaaagtaaattggaaataatgcagttgtaatgacgagcgagtatacagagttcgcccaatcgtataatatccagcttttttcttgtctggacatttttttcatataatgttcccccttaaatttgttttactaacagtgtacaaaaataaaaattataaaaagagaaacagtgatgaattttacataacttttacatatatacacagttctttacaattggagtaaatcctctacaattgctccgtctgtttcacctaagtgtaaaccgagtagtctagcgatagttggaccttcatcaataagtctcatatacgggacggtaaagccactttttattcctttcccagcagcgataaaaattgtttcatagttaggttttgttggagagtatccatgcgtaccaaatgtatattttttactaggcgtaacatctttttcagtaatttcttttataaaatctcctgtatagttttcagtgaaataatacccttctcgtgcttctaacatgaataaacaattaacgtctgcaccgcagtctttggcagcttcatcatgaagtataaattcaattccgttttgtttattttgaagtagttcttcaaggagtagttgtacctcccggattgtatccgtatcatttttgtcccttacatatacataggcagagccgtcgcaactttggcaataggctttccagtctactaattttccttttttattaagagatataagtcctctttcatggaatagcacatttaattggatggatttgttttcacttaaagcgctatgatcaccaagggcaataattgtactttcttcgtataggtcactttcttttagtgcttgaataattttccctagacgttcgtcgtgtctctggatagcagctgttgtttcgttagattcaaagccgtgatagtgtctttgtgtgtctagatcggtgaaatgtacgaacatgacattaggctttttcgtctggattgtatgcacagcagaggcgaggacgaaatcatccagctctggttgtgataaaccatttcttatatggccgaaacgacgatttaaatctaattggtatagtgggctaccgctaaataaggaaactaacacttgattttgccaaggtctattggggaaaatttctggtaaattgtaatcgatgttcgctcttccagtaacaggccatagaagggcagctgtcgttaaatttgctttgcgcgcttcatcatacaatgttgttccttttattgattttcggtaccaatgccaatcaggtgattcacgccctggttgaagtaacgtattgctaacaacaccgtgcttgttagggtaattaccagttacgattgttgagtggcttggatatgttacagaaggataaattggttctactttttcgacaaccgtgcccttttttattagagattggaaatgaggtagtttttgtagtataggaaaatctaaagctgataaacagtcgaatgataaaatgatgacgtggtttgttaatgctttatccataaagttccctcctgattatataaaacctattattatatattactattaacacctagtaataaatacatatatttaggtgaaagtttattatttattttcagaaaaattaaacatataattaagtataagggaatctatggagggagggaacactatggattggttagatggatttggtattttttacatcattggcggaatcacgattatccttgtatttactatttcatatttactaaagaaacggtttccagacaaacagtttgatattatatttgcacttagtttaatacttctttgcttagcgtcctttcccgttacaatgatggttattggtgggtgggaaggaatgggatatggatttattggtttcttcgtcctaattggtacacttatcggtatgattgcacatcaacttgtgaaaattacgcggaaaagctacgtataaaactacaaaaaatgaaaaggatatataaaaataagaaaattagctattgttttaaaaaagaatttgtattatgataatcaacaaatttatttcgttataacgatgaaaaaggactagtacatgttcaacctttttagcagagagagaatccgtcaggctgaaagattcttaaaaaggcaatatggaacctgcctttgagttctgcatatgcagcgggaatttcccgttatcaaaaagagagcatgcgcaatttttgtgcatgaatcagggtggtaacgccggcaaagctcggtccctatttagggacgcgggcttttttgtattttctagaaggaggaagactgactatggcaaaagaacaagtgcaagccattacgaagatggaagaggactttgcgcagtggtataccgatattgtaaaaaaagccgaacttgttgattattcaagtgtaaaagggtgcatgattttacgtccgtatggctatgccttatgggagaatatgcagaaggtgatggatgagaagttaaaaggaactggccatgaaaatgtatatatgccaatgtttatcccagagagtttattgcaaaaagagaaggatcatgttgaaggatttgctcctgaagtagcatgggttacgcatggtggagatgaaaagttagcggaaagactttgtgtacgtcctacatctgaaactttattctgtgagcacttttcaaaaattgtgcaatcctataatgatttgccaaagttatataatcagtggtgttcagtagttcgttgggagaagacaactaggccgttccttcgtacgactgaatttttatggcaagagggtcatacaatccatgaaacggcagaagaatcgcaggctgaaacattaaatattttaaacttatatgcttctttctgtgaggattatttagcaataccagttattaaaggacaaaaaacagaaaaagagaagtttgctggagcaaaggcaacttatacaattgaaagtttaatgcatgatggaaaagcacttcaaacaggaacctctcataactttggcacgaatttctcagaagcatttgatattaagtttttagatcgtaacggtaagtggcaatatgtgcaccaaacatcttggggtgtatcaacaagaatgataggcgggctaataatggttcatagtgataataatggacttgtaatgccaccaaaagtcgctccagtgcaagttgttattgtaccgattgctcagcataaagaaggagttttagcaaaagcaatagagttacaagaacatattcaaaaggttgcacgagtaaaaatagatgctagtaataaaacaccaggctggaaatttaatgagtatgaaatgaaggggattccaattcgattagaagttggccctaaagatattgaaaagaatcaagttgtacttgtaagaagagacacgaaggaaaaagagtttgtaccaatggatcaattagaagaacgtattccagcattacttgaagaaattcatattgctttatttgataaagcaaaagcatttcgcgatgagaatacgtatgttgcgacaaatttcgaagagatgaaaaaaatagctgacgaaaagcaaggctttattaaggcaatgtggtgcggggaattagcttgtgaagaaaaactaaaagaagaagttggagtatcttcacgttgtatgccttttgagcaagagcatttagctgaagaatgcatttgttgtggtaaagaagctaaacaaatggtgtattggggaaaagcgtattaatactttttctgataggtgataaaaaggactttgggctgcataataaaatgcaatccaaagtcctttttagttttataaagtatttcatgtattctttagatggaagtatgttgctcttattttacgtttttacgacgaataaacagtaacataccaattaggaatattgaaagacccattaaaatagatatagggtaatgcgttgcggtattcggtaatttatcaccttgttttttcgtattatcttttacattacccccttgagaaccgttgccctcctgagaattgctatcgcctttaacacgattgccaccttgagagccattaccgccgtgtgagccactgccaccagaaccatcgccaccagaacggttaccaccagaaccgttaccgccagaaccgctgccaccagagccgttgctaccagaacggttaccaccagaaccgttatcgccggaaccattgccgccagggccactgccaccggaaccattaccgccggaaccgttgccgccagaaccgccagaatcactgccgctagaaccgttgccaccagaaccgttatcgtcggaaccattgccgccagggccactgccatcagaaccgttaccgccggaactgttgccgccaaagccaccagaaccgttttcaccagaaccgttttcaccagagccgctgccaccggaaccactatcgtcctgagaaccgttatttcctggaggtttattattatcctttgagtttccttctgcaaaatgatcgctattttgtacaatagcgtttgttaatggttggaagttttcagttgcagcattaccgatatttaaaccgctaaaaaaagatagagagagtgttgatgctaaaatgaagattttcgtcatggttttcctcctaagaaatgaatgttccatctaaaatacatccctttgtaatatttcttaggaaaaagagttttatgcaaaaaaaactatatatagaaaaaggtggtatatttgtcaaagcagaaaagagttaatgtagatttcctacaaataatagaggtggagaatttacattcataacggtagaggaagtggcagtagatgaaaaagtatatagcgtttgatattggcggtacgcaaattaagtatggcattatttcagaagcagggagagtattaaagcgtaaaacagttgcaacagaaattcacttaggcggagaacaaattattcaaaaactcattcttttatcaaaaaaattaatgaatgaacatactattgccggaattggtattagcactgcgggaattgtgacgggaggcgcggatcatattccgggatatagtactattcctattattgatagattgcaagagatattaaaagttccagtatcgattgacaatgatgtgaattgtgcagcgtttggagaaaagtggaatggtagtgtaagagagaaagagaactttattatgctcaccattggaacaggagttgggggagcaatttttatagatggagaattgtaccgaggacattcatttagtgctggtgaatgggggaatatgctaatagaaggaaaaacgtttgaagaggttgcttcgatttcaggattaattcggcttgtaagaaaatataaaggcaaaggcgagtggaatgggagaacaatttttgagttgtatgataaaggagatagagaagttgctcaagcagttgggattttctttaaacatttggcaatcggaattagtaatcttgcttatatttttaatccagaaacaattattattgggggaggaattaccgatagaggaaatgagtttttaaaagaagtaaaagaagaggtcagtaaatacttaaatcaagagatttataataattgtgagattgaacttgcacaaaacggtaattgtgcaggaatgattggtgctatttaccacttattacatcatcataagtaaattatatgaatgttttcatataactgagaatttatcctttttatcaataggtaaataatgctacaatataagagaagaatacaatattttccgatatggaaaatgctttgtagaaagggagaaacttcatgcctattattttagaaaaaggtcaaaagatcgatttaacgaaaggacaaccaaaagtagcaaaactacaggttggcttaggctgggatccaattgggcaatcaggtggatttctgtcttcattatttggaagtaaaccaaatatagattgtgatgcatctgttgttatgttagaaggagatcgttttttaaacaaaaatgatttagtttacttcggaaacaaactttctacttgtggtagtattattcattcaggagataatttaacaggtgaaggcgaaggtgacgatgaaacaatctttgtagaattacataaagtcccaagtcgtattaaccgtttagtattcgttgtaaatatttatgactgtgtaaacagacgtcaagactttggtatgattcgtaacgcttatattcgtattcaaaatcctcatacaggtgaggaattagcacgttataatttatcagaaaactatgctagtaaaacaactttaattgcaggagaaatgtatcgctacgaaaatgagtggaagttttcagcagttggagaaggcacgcaagataaaaacttaagtgagattgtatcacgttatcaataggataaactaaggaggaatttttaaatggcatctatttctttaaaaaagggacaaaaggtagatttaacaaaaacaaatccaggtttatcaaaggtacttgtagggcttggctgggatacaaatcgttatgatggacaagctgatttcgatttagatgttagtatctttttagtaggtgcgaacggtaaagtttcaggagcagaagatttcgttttctataataatcccaaaggtgcgaatggtgctgtagagcatttaggagataaccgaactggtgaaggcgaaggcgatgatgaagcgattaaaatcgatttaaaaaatgttcctgctcacatcgaacgtatttgtttcacaattacaatttatgatggagaaggccgcagccaaaactttggtcaagtttctaactcattcgtacgtattctcgatgaagaaaagaatgcagagttaattcgttacgatttaggagaagatttctctattgaaacagcggtagtagtaggtgaattataccgccatgcaggtgattggaagttcaatgcaatcggaagtggattccaaggtgggttagcgtctctatgtaataactttggtttagatgtagagtaatagatttaatttatatatccattggtgaaatgcatgtttactgatgggtatatttttaaagataaaaatatagaggtgaatataaatggctattcagttacaaaaaggacagaagattgatttaggtaagacgagtcctggtttaacaaaagcagtaattggtcttggatgggatattaaatcttatgatggcggagacgatttcgatttagatgcatctgcttttttattagatgcgaacgggaaatgtacgaaggaaactgattttatcttctataataatttaaagtctccttgtggatcagttttacatactggcgataacagaacaggtgaaggcgaaggcgacgatgagcaacttgttgtagatttgaaaaaggttccagcagacgttcataaaattgctattacagttacaatttatgatgcggaaggccgtaatcaaaactttggacaagtaggaaacgcattcgttcgtttagcgaatgaagagacgaacgaagaagttcttcgttttgatttaggggaagacttctctatcgaaacagcagttgtcttttgtgaattataccgtcataatggacagtggaagtttaatgcagtaggaagtggattccaaggtggtttaggtgcgcttgtaagagcgtatggcttggatgcatagaaaggaaacgatattcgtttcctttttttgacctttctataaatctagcaaagaataggggataaaggtaagatgagtattttgcaaggaatccttgatacgtatgctcagtttttcgacttggacatgtggattaaagtgttgcaagatccagtatcttggggattaattggtacacttgttgtacttgaagggttgttatctgctgataacgcacttgtgttagcggtaatggtaaaacaccttcctgaagagaaacgtaaaaaagcattattctatggacttattggagcttatatattccgctttattgcaattggaatcggaatgttcttaattaaattatggtgggtaaaacttcttggtgcactttaccttgcttggttatcagtaaaatactttattgataagcgtaaaggtgcaggtgaagaagaggaagctcatggtatgaaccaaaacagtattttcttcagaatgttcggtgtcttctggggaacagttgcaatggtcgaattaatggatatcgcattctctgtagatagtgtacttgctgcatttggtgtatctaatgaagtttggattttattattaggcggaatgctaggtattttaatgatgcgtggtattgccggtgtattcttgaaattattagagcgtattccagagcttgaaacgacagcatacattttaatcttaattattgcatcgaaaatgttactgtctttaatcgagattgagattagtcatacactattctttattattttagttgtagcatttggagcaacatttataattcactacatgaagaattctggacaagctaaagaagaagttgcagctactaaagaagataataaataattgaaatgggtttgctcgttttgcgagcgcccattttttataacaaaaaatagtttataatagaagaaggacttagaaaaaacgtaactgtttttggaggtgaactgttgtgttttcacgttttacacttcaaccatatgcattaaaagatgaatcagatttaaagcaatttgaaacgcttttagaaaaacgtccacaatatgaactgacagagaatgagatgaaatttagttatatagcatgtcgaatccttggcgttcctaatgatgtagatgaatattttaatgaactgtttgattatagtgaagcgaaaggaatcgaagttttacacgaacaaaatttaaacaaagtgattgattcggaaaagcttcgtcatattcaagaagtgttcggattacatcaagaagcaccaaatggtctgacagtaaataggttagttgcacacttatctgggaaacaacttttaccgaaagtagacaatcctgatttacagcattacatacatacgacgtttatttcactattgaaattatatgagaaacaacataatcagtcgttaaagacagaaggcttccgtcgtttcttaatcgacataattaaactaagcgaaaattatgtagcgaagtggtttactacgattaattataagaaacagatgccgcgtatcgtttggtatggtgatgcacaggaaagccgtatatatttcttatactttcttattatgctcggttgtgatgtgctttattatcacccagaaggaaaagatggatttgagaatgttgatgaagagggaaggacctttattgtgtctcatccaggccgtatttctcttgaaccatttccagatcgccgccgcgagcgtgtggcaacagtagcgtatcaagcttcaaaagaaattgagcaagtacttcaccacgataattcactgctgtacaagccgtggcaattccgttcctatacgcctgtagctcgtacactaaaaacaacatatgatgagctctttttaattacgaaagaaaaggcgtttgtacgcccgacattctttgttgaaaataaacatatttatatcccttctttatttgcgaaaatatcaggcgtttcaaagaatgataaagagtattttcaacgattaaaggctgttacatcatttgataacagtatactagttaatacattcccatttacgaaagagcaaaaagcaaacttccaatatcattatcgagatgcattagaccgtggggggaaattacatcctgatctaattatgaatagccattggtggccgcataagcgtttaccggaaggtttacaacatgggattgcagaagcgattatccatacgtgtgaaagtgaaatgtgcaaaccaattgcgaaagagacaaaacaagatgtagcgctatatgttttcgcgcaactttctcaaataccaccgaatattttagaacagcttgagaaatttgattattcacaagatgtgccgaaaattgttatatttaataatgagaagagtggagagttaactcgttctgatgctgttttattactatttttaaatcaaattggagtagatgtattccatttcaatccaacgggaagaaacgatattgaaccgtatattgaagcgggggcatttgattcccattggcttgaagaggttaatttcgatcttgagtttcatggttcatcagcctataaaaatttatcacaaacaataaaaggactatttcgtccatttttataaggaaagggagaataccatatgaataacccagtcgtactagatccgaaaacagaattaaatgagcaaacagcacaagatattcgcttgcaacttagacaagatgcggatgtacaacgtatttataatgcagtagatattaaagatcaattagaattaattgaacttggaaaagaaccttctatggaaatttcacgttttgctgatcaaattttacatacaatgtcattatcaaagatagaagattctggtgaattattaaaacagcttggtaaaattatggacagatttgatagcaaagactttgcggaagagaaaagtggtttcttctcacgtatgttcaaaaaagcggataaaatgattgaacaaatctttagcaagtatcaaacgatgggccgtgaaattgataaagtgtatgtggaaattacgaagtaccaagatgagatgaaaaaatcaattggtacgttagatggcttgtatgagcaaaacttaaaatattatttagacttagagaagtacgtagtagcaggagaaatgttattagagcgtttaaatacagagttagttccgatgtatgaagagcgtgtgcgtaataatgatcaattagcaggtattgaattagagtcgcttaaaaactcggttgaaattttagagcaacgtattgatgatttagaaaaagcgcgtatggttgcgctacttacagcaccacaaattcgtatgattcaacgtggtaataataaattaattggtaaaattaatacagcatttattacaacgattcctatttttaaaaatggtatcattcaagcggtaaatgcgaagcgtcaaaagcttgttgcagattctatggctgaactggatcgccgtacaaatgaattacttaagaaaaatgcacaaaatatcgcaacgcaaagtgtagaagtagcgagattatcaggttcttctagtattaagatggaaacacttgaggaaacttggaacattatttcaagaggtatgcaagaaacacaacaaattgaagaacaaaacaaacgtgagcgtgaagaaagccgcaaacgtatggctacattaacagagaatatcaaaaaagaattacaaggataaagtgaaactttaatcagtggggttttgttcatccccaccgattattagccttcacaattggacatttatgggcagttaatctaccacctaacttctttgctcaaactgaattttgaggtgggagttttactgcacggaaaatagtagggtaaatgaaaaggcaatgaggactattcctcattgccttttagtttctcttcactaatttaataatctcattcacaataagtggaatgatacttaataagagaacaaatccccaatctcgcatcgttaatgcatgtacaccgaatatatttgcaaggggcgggatggagatgatacaaacttgcataagaacaccgataagaagggagaagactaaatatttatttgtaaagatcccaatggaaaaaattgatttcgttcttgaacgcaagttaaatgaatgaacgagctgagaaaaactaagaacgacaaatgccatcgtttgagcgtgtaatagagcatcctcatcaatttgctctgggaaaagagggaataaatgtgtatctccagtatagaactttgctccggcgataaaggctattagcgtcaaaagcccaatgacaatcccattgaaaataaggaaaggaacgctaccactaaataagctttctttcgcatgtcgtggtttttccttcatcacatcaggatcttcaggatcaaccccaagtgataatgcaggcagggtatctgtaattaaatttacccacaaaatgtgaataggtcgtagtggtgttgcccagccgagtaaaatggctaaaaataaagtgataatttctccgaagttacaagagagtaggaagagaattgatttttttatgttacgataaatatttctaccttcttcaacggctttcacaatagatgagaaattatcatctgttaacacgacatctgctgccccttttgcaacgtctgttcctgtaatgcccatcgctacgccaacatcagcttgctttaaagatggtgcatcattgacaccatcaccagtcatagaaacgatatttcctttcgcgcgtaatgcctttacaattttcactttatgctctggagagactctagcgaatacatttaaatgattaattttgctagctagttctgtatcagaaatgttatctaattcagttccaatcataatttccgatatttcttcagcaatgccaagttcttcagcaatgccaagttctttggcaattgcaaaggcggtatctttatggtcaccggtaatcataactgtgcgaataccggcttttttacattctttaattgaatctttcacttcagttcgtggtggatcaatcataccgacaagaccaataaagataagattttcttcaagatgatttatatccatatcgtttgaattgtattgtttaaatgcgaatgaaagtactcttaaagcttcttgagacattgctccggcagattctaatatttgatttttatcagaatcagttaaaatctcgattttgccgtttttaaaaatatgggtacatcgaggtaagagcttatcgatagcgcctttcgtcatgctatagtagctttcatcgtatgtatgcacggttgacatcattttacgatctgaatcgaaaggtacttcgttaacacgttcatgtattttttctaaataatctttttgcatgttaaaagtggttccagcaacgagaagtgcaatttcagtcgggtctcccgtttgtgattcgttattataagacgcatcattacatagcaccatattttctaacaatagacgttgcgcatcattatttacatttaaactttctaagcgatcgtatgtgttatcactataaaagtgagtaacggtcattttattttgcgttaacgtacctgttttatctgaacaaataattgtgacagaaccgagggcttcaacagctggtagtttgcgaatgataacgttttgtttaatcatacgttgcacaccaattgcaagaacgatggaaacgatagctggcaagccttctggaatagctgcaacggctaaactaatagcagtcataaacatttctaacgtatcccggccttgtaaaaaaccgatgaggaacataatgatacaaatagctacagcgacaaagcctaaatattttccgacttgtgctaagcttttttgaagtggtgtcatatcatcgtctgcttcatgtaaaagggtagcaatcttaccaatttgtgagttcattccagtttcaacagcaacaccgacgcctcttccgtatgttacaagagtagacataaaggccatgtttttttgatcgccgagtggtacttgttcatcactttgcatggaagggtggtagattgcatctttatcaacagggacagattcaccagttagagcagattcttcaacttttaaatttgcggtttcaataaggcgtaaatcgcatgggatatatcgtccggcgtcgagcataacgatatcacctggaacgacgtgctcagatggaatttcttttagttcaccatgtctcttgacgatggctttaggtgttgccatcttttttagtgcctctaaagcttgttctgctttagattcttggacaacaccgataacagcatttaaaactacaacaagcgcgataatactggcatccgcccattcacctacaaaggcagaaataagggcagcaataataaggacatatacgaggacgtcattaaattgggcgaaaatacgctgccataaagtgcgtttttgttttgtagctaattcattagaaccgtattgctttaaacgttcacttacaatttcatctgttaaaccgtgttgttcgtttgtttctaggtcaattaatgtttgatctttcgtcttactgtaccaattgctcataagtaagcacctccagtaaaaacagttagcaatggtagtgttgctattatttgtgagtagtatgtatggagaaaaatctaaggtgaggttctacttctattgtacaatattttacagttggttgagggaaagagaagagttgtcatgaatttgttggaaataaaaaagagcctcatataagagaggcttttttactttttaattaatgtacctaattcttctgtaatagcttgcatttcactaatgctgaatgtttcacgtttcataacatgatcataaatgtcacgtaaatcttcgtacatttcttcgttaaaactagcagctctcatcgctccagcattaaccatacgtaatttttctttaatagcttcgaccatatattcaacgttttcttctgactttacggataaatccaccgaagtgtccccctttaaaataacataaggctatcttaacattttttatcattttcgttaatgaatcttttcaatcccattaaattagtagggatttcctttatatttaataattggttgtttatactataagtatatataaagaaatgcaccaagaagggaagaaacaaaagtatggttcaagtattgtttgtttgtcttgggaacatttgccgttctccgatggcagaagcgatttttcgaaatcttgtcgtaaaagagggacttgaagagaaaattgtcattgattctgcaggaactggagattggcatgttggccatccgccacataaaggaacacaaaaaattttaaaagaaaatgcagtcacttttgaaggaattaaagcaaggcaagtagaaaaagaagacttaacaaagtttgattatattattgccatggacaacaagaatatagcagatttaaaaagtttaggtaaaactggaggctatattggtaggctgtccgactttgttccagacggtggctggacagacgttcctgacccttactatacagggaatttccaagaagtatatgaccttgtaacagaagggtgtgcaaagctattagctttcattcgaaatgaacaaggaatatgaggaagcttagaaagaaatactttctaacataagaaatgaaagggtgaaggaatatggcaaagaaaaataatattgctcgaaacattgcgattggtgtagcggcaggtgtagctgtatccatgttaaagaaagaaaaccgtgaaaaagtaaaaaatacagcagaaaaagcaaaaacaaagatgattgaaattggtgaaaatgcaaagattaaagaaaaagtgcaaactgttacagataaaggacgcgaacttgctgatttcaatgtggtaaaagcgaaagtagcagaaattaaaaaattaacgccatctgttgtagagacgttaaaagaaacgaaagaaatttttagtaagaaaaaagttgagccagaagaaaagccagaaacgattgaaattcaagctgtatctccaaaggtagatgagctgaaagcagaagaagagccagtagttgctgaagatggtggtatgaaagaagcgcgtgaattatttatgaaagactcaaatgcagtggaaaaaaaaactgaagcgtacattgagttaaagcaagataaagaagagaagaaaagcgtttaaacatatatgagaaaaattttagaaaaggtgagaagaaatcgtacttattcgtttggtaaagatttatatgaccggacgatgcgcgatgatgtagcgggcttggcagcacagctcgcttatttcttcttgcttgcaatttttcctgggctcgttttcttaattacgcttcttggatttattcccattcaaacagaggatgtgcttagtttattagaggtttatgtaccagatgatgcaatgaacttaattgaggtaaatgtagataaagttgtaaaccagcaaaatggtggtttattatcatttggtttattatccatgttatggtttgcctcaaatggtgttaatgcggttatgaatgcttttaaccgcgcttatgacgtgaaggaaacacgttcttttattacaacaagagcgttatcaattgtgtttacattagctattatttttatgattgtctttgcattaattgttccggtattcggacaagttattggagcagcagtgtttaaagcactcggtttatcagatagtttttctttcgtgtggagcattacacgattagtagcgagtttcttcgtgctatttgctttgtttagtttcttatatacatttgccccagatcgaaagttaaaaagaagagaagttatttcaggggcgttatttgctactgtaggatggattgtggtatcgtactcatttgcttattatgtagataagtttgcgaattacgccaatacatatggtggtctcggtggtatcattattttaatgttatggttttacttaactggatgggtaattttacttggcggtgaaattaatggtttactccaccattatagaaccggtgacaataattcccgtaatgaataatgagctcttgttccataataaaaaggaacaggggggatatttcatgagtaataataaaaagaaccataataataaaagtaataataaacaaaagagcagttcgcatccaaagcataaaacgagtagcagtgcgaacggtcataatagctatcattaaaaaaaacgggtcctctatgagggacccgttttatttgctgccttttaataatcgtaagccattcaaaatgacaagaatcgtacttccttcatggccaataacaccgaatggaagagctaaaaattgcaagaagtttgaacaaattagcatggcaataacggctagcgaaaagattacgttttgcttcacaatacggttcattcgttttgataaacgaattgcttgggaaagacgagatagttcgttcttcatcagtacaacatccgcagtttctaaagctacatctgttccttctcccattgcgacaccaatgctagcagtagctagtgcaggtgcatcatttataccgtctccgaccattgctactgtaccgtatttttcttttaactttttaatcgtttcaacttttgtttctggtaaacatgatgcgtaatattcctttatattactttcagaggcaattgcttttgccgtttcttcattatctccagtaatcataattgcttcgacaccaatgctttgtaattcacgaatagcagctattgtttcttggcgaagcgtatcttttaaagcgataagtccaagaatgcctccctcatcactaatataaacgacagttttaccttccttttcaagtgaggcagaaataccattatgaaatgtttttgtttcttcaccgataaaatcagctttacctattttataagcgttgttttcgaatattccttttagcccaaaaccagttacatcttcaaccttttcaggtttttttaatgtaatgtcgtacgcatgttgtgcatatttaacaatagatgcagccaaaggatgtgtagagtgactttcaatggatgctgtaatagaaagtacttctttttctgtcatattttctcgaacatatacatctgttacggtaggttttccttctgttaatgttcctgttttatcaaaggcgattgcttttactgaagcgaggcgttctaaatgtatgccacctttaaagagaattccatttcttgctccgttagaaattgcagataacgttgctggtgtaatggcagcaacgagtgcacaaggagatgcgactacaagtaagatcatagcgcgataaaacgtttcattccagctccagtcaagtaagaaatgaggaacgaacatcataagcgcaacaacgagtagtacaccttttacgtatgttccttcaaacttttcgatgaatagttgtgatggtgatttttcactttgtgcactttggacgagacggataattttttggaataatgtttgatcgcttggcttcgtaattttaacttcgatagcaccacgtaaatttacagtacctgcaaatacttcatcgccatgtcttttctcatttggaataggttctcccgtgattgctgcttcatcaatatttgtttcaccgttatgaatcgtaccgtcagcgggaacacgttcacctggtttaattaaaataatgtcgttaatttgtaactctccaacaggaacacgttcctccgttccgttggaaatgcgtaatgcttcttcgggttgtaagtcaagaagagcggaaatttctttttggctcttacttaatgtataagattccatagcaccgctgagcgcaaagataaagattaagatagccccttctgcccagtagccaataattgcagcaccaatagctgcaaagagcattagcatttcaacatttagctctttttcttcaatcgtatcttcaatgccttctttcgcttttgcatatccaccaactatataagcaaggatatagcaagtaatacctacattcattacatcgttttttgtgaataaccagccaactaaaataaaaataccagatgctactgcaaatacaagttcataatgtttttttaatgtgtcccataaagagggatgagaaattgtttcttttgactgtaacgtttttacttctgagttcattactacccgctccttccgcattcttattgagaaaaataatcaaaatcgaaacccctataaaacgacgaaagctgccatccataatggatagcagcatttctgttgaatctgtttttaatagttcttatgttgtaattattctatagtatatcatatgtttttatgagatggtacggttttgtttcaagtataaacggaaaacttgtgttttcgcaactcctctggtatatatgaatattgttcataaaaagatcggaaaggaagacaacaagtgaagacagagaaaatttttacccatccgattggcgtatttattgctgcaatagtagcaacttttttatggggaagcgcatttccttttattaaattaagttatgttgaacttggaattcaaccacaagaagttggagagcaaatattatttgccggttatcgtttctttttatctggagtcatgctcttattattctttaaagtgttaggaaaagatatgagcttcaaaaaaggaacagggaaacagttaatacaaattggtttattccaaacgtttcttcaatatatctgtttttacattggaatgagttatagttcaggaattgaaggagctatcatttcaggaacatcatcattctttcaaattttactcgcccattttttatataaagatgatgctctcaatatgagaaaattaattggggtatctattggtttttgtggcgtcattttagtaaatgtgccgagtgatggtagcttatcatttcattttgggatcggaagcttattacttcttagtgcagcatgctgtattcatatggaaacatattagcaaaagaaggtagtaaaacattagatgttggctatatgacagcataccaaatgatttttggttctataggattattatgtataggggctttacaagttggagtcatgccatttacatttagtctacatgcactacttatgctaatttatttatctttcttatctgcagctggtttttgcatttggaatacaattatgaagtataacaaggttggaaaagtatctatgtatatgttctttatacccgtatttggtgtgttattatcgagcatgattttaggtgaagcaattcattcatttgtgctactcggtttagcatgtgtagccgcgggaatcattgtggtaaataggacaccagctaagcaaaaaatggagcaagaaaaacaagtagcatagagagcagaaaagcgattacaatggaagaacagtactgttcttcttttttcatagaaaaaggataatagactaagtgtaacgaaaaaagatacaaaaagcatttattgaggagaaaatattatgaatctactttacgtggtgttaattgggcaaatatttcttttttttattggtgcaatttatgcaatggggcagacaaaaagaacgaaagataatatgccgttacctttagcaattcgtcttattcttagtttttctttaacaggtagtgcaatttgcatatggttacaagatccatctgtagagtatagtacgtgggttgcacttggtatgactttatcgactgtgggagatttgtttatggctgggctgattccaattggtcatcgattaattggagggatggttactttcgctcttgctcattgtttttatgtaaaagcatttttgcaaacaggaatttcatggaatggtttttggattggcttactcgtatatgggctctttctaattgtaggatggttcttctttatccgaaatgataaacaggataagttgtttacgataggagctctaatttacggattgtgggttggaggaatggcttgctttgcattcgccttatattatgaaaatacagggatatggtggataccagcgtttggtggcttactgtttgtaatttctgatttcattattggcgtgacagatatcggagggcgtaaattgaagtatgagccactttggatttggcttacatatgtagctgctcaaatgtgtattgtatatgtgggattataaaaagatactctcaaaaatagtggatagactattttgagagtatcttttttgcttgttaatttgatcagtatttttattgtgaaatttctaatattataattttacaattcagaattttgtagaaaatcaccggtcgtattatttataataaaagtaaaaagatgatgagttggtgaaatgatgcaaaagaaaaaacgttggcgtgaattctttggaactattgcaattgcatgtttattggtgtttttggcgaaaatttttgtgttttttccgacgactgtaaaaggagcatctatgaggccaacgttgcaagatggagatagggtgattgttaataagttagcaaaacaatttgaaagctatgggagagaagatattattgttgtgaaaacagataatttttatgtcaaaagagtgattggattgcctggagatataattgagatgagaaatgatcaattatatgtaaattctgaaatgaaagatgaagagtatttggatagtaataaaaaacaagcagaaaaaaaacttatgaatttaacagaggactttggaccgattacagttcctaaaaataagatttttgttatgggagataatcgcttaataagtaaagatagtagaaatggtttaggttttattgatagagaagatgtgttaggaaagttagcaggcatttattatccgtttgaacatatgaaaataataaagtaaaaaaaccaagcaaattttagtttgcttggtttttttgttaaacagtaggagattcgtttgatacaaagatatcttcatgtttctttgtagtacttaaaacaaatttatgttgtagtaattgtagtttaaataacgccaaaggatcatgatatgtttctggattgcttcttagcgtcgctaatgtttgctcgtcttcctgtatctcaagttgagctgcatctacattttgtttcaatatattaagtggatctttgaagaacatcatgatatcacgttctaatgcaccttcaaatacttcaaattgaaggaagaattgtttggaaattgtgtgagcaatttctgtatagtcttctgtttcaatatattgtttatatttgttggcgagcatagattggtttttttgcatattaccaaataattttccggcactttttaagaaaaactgtgtcggtgtaaagcgtaataaaatattgatgttcgttactgtaattcgatttgtcattcgtgcaacatctcgattccaatcatctaataatttgaaatcgcaaggaagtttcatacgttcttctttatataatttattaaacgtttcactcatttcatctaaataagcttgagcttgaataaattcattatgtgctgtttcaatccattcttgaatagacccagtaaatttaggaagaagtacctgttgtacatgcttttgaacacgttcattcattgcagcatttaattcttcatgaactagtttgaaatcactatcttcttgaacaagatcagagcaactctgtaataattcaggaatttgagaatgtatatctcgtgtaatttcttctttcgttaaaagataggattcggtaatagagcgaattttatctttttcaagagcagtaaggttattaataaatccagtaagtttcactgagatgtgtttattccagcgtacggattttactaatgtattttctaattccacacgttcatttatgagataagcaattgtcttttgtgtaaaccatattagcttttctatacgttctttttctatatcgcgttttgcaagattagagagaatagattctgttacatctccaagttgctggctactctcttgcgaaggagagtatgggaagaattgtgcatctggaaaatgtactttaagtttactaattagtttttcattagtagtcgtattatttgtgtgtaatacgaagtgaatttgtaagtttggtacttgttcacgtaaataaattaatgtatcaatttctttactatgcaatggtgaagaagaatttaatacgtaaacaagactatctgctgcttgtaagtattcaaagtatgcattgtttttatccaattgctcttgaatggatggtgtaagaagaaatgtaaacttattttttcttaaaaacctacttggtagcttaatttctatacattttttctcaagttctgactgagcagatgtagccgttatttgatggaattcatcaaggttagggatatttcgtatatctaactcggtaaattctgttatttcagtttgactagcgtctttaaatagaataggagttgttaaagtttcagttaagatgttctctcccaatattgaattaacaaatgatgttttatcatggtcactagttccagctattagtagtggtgtgacatttaaatcacatagttcatggactagtagcgtaaattgatgacttaaatctacatcatttttctcagcccatacagcgattgtttcgaataaatgagaaactgtttccatatttacatctgcttcagctgatgtattagaaagtaaggatccagcactttttacgagtaatgattctaaagttgtaggtgagacttcattccatgctaacactgctgcagagacaactagagaatcttttgctttcgttaaactaaaccaatttgttaataaatttggtacaagtccgtttaattcatgcataaaatgatttccggtaattaatgcaaagtatgtttcttgatagcgagtagaaatttcattccaatcgtcattattgtctgtttcaatatgcaagaataaatgattaatactttgaatccaaggaaggtataaggattcatgttgatagctattccaaagagcaataacaagctctttaaattgagcttgatcaacagcatatagagcttttaaagactcatagaaatattcaggcttaatattttttgtaaatcctttgtttatgtaatttattaacgtatcaaaccagtgtaaagattgtgttcgaataccttcttgaacagctagttcgatagcgttgttccaatcttcttgtttttcatagaaagaacgtgcaattgcagtaatatttggataatccggttggaatgcaacagcttcactaatcgtcttaaaagcgagtcctaaacgatcttgttcgatataaagagaaagaagttgtaaggaaacctccatcgtaagagttgtatcttccgtttgaatagattgataaatttcttctgcctttggtaagaatcctagttcaaaataagcatctgcaatattttttgtcgcccaaagtgcaagagcattatttactttttcccatttaaatatagctgcttcaaaatctttattttgataataaaattcaccttgagcaaatcgaatattagaaatgttggagaattcatttttagattcatttatatatgcttcaccgagtacttccgatgcaggagtagaagtttcttctgttaaaaatgttttatagtaaactttttgaataaattgattttcaatggtcatgttcgttcccccctgtataatttagaaaaatgatgtcgtatgtaaaagggtgtatgttcttttaataggtagaagttgcattatatagaccaaactatgtttttgctagatatatcatttttcttgagagttaaaccgttgcgaaaagtaactttcctttattgtaacaaaaaaacacgcatatgaatttttattttttatcgggttatttgcgggcagtaagaatctaatctcaaaattgttgaatgtaagtaagttatgtgggagtcgggatgtctatagaagcaagattggcataggttaataattagtagaggataaacaaaactcccactgattaaagtttcactttatctctgttaaaggaaagaatagaagtagagttcattataaaaacaatgtatagtgaatatgtataccatgtttgccttaaagatagaaagggtacaatgtggaataacgatcgtgcataggatgtgtcttccgaatggaacaacatattggcgagttaatcgcgcattatggctattttggaattgttatagctttggctggtgggattgtcggattaccgataccagacgagtttttattgacctttgttggttataatgtttcaaaaggagttatgtcaggaactgctgcttttttaagtgggatggctggtgcgatgttagggatcacgttaagctacatattaggtttaaaacttgggctccctgttttaaagaaatatgggccgaaaattagaattaaagaacatcacattgaaaaaacacatattttatttgaaaaatatgggccatttcttttaatgattggttattttataccgggagtacgtcatttaacggcatattttgctggagtatcaaatttgacattttggcgtttttgtttgtacgcttatggtggtgcgcttatttggataagtgtttttattgggcttggctggaagttaggcgagaagtggcgcttcgttgagtatagtttacatcattatggaatatggattttattaatttcagcagttgttacatgtgttgtatggttgtacataaagaaaaagaaaaaccgctaatagcggttttttttagctgaaagcaataaataatacaccagctgtaataaagactacaccaacaccggtcataaagtttaacttttcaccgaggataatcatagcgagaatgatagaaaatacgacgcttaatttatcgacaggagctacttgtgaaacctttcctgttttgagggcaagaaaataaaatagccatgacgaagcacctgcaaccccacttaatgtgataaatagcagtgcttttttatttagcagtacgtcgccgatattttgaaatttaccttgtatgataataacgcctatcataaataatgccataataatagatcgaattgttgttgcaacgtttgcatcgattccgtctaaaccaaactttccaaaaatagatacaagggcagcagcaattgctgataatagtgcaaataagagccacgaactcatagtaaaattcctccaatcttacagtattatacatgaaaatgattctcatgtataaagttgaagcaattgagctttataggaagtgcgacttcaacttaacttcttgctccacctgaattttaaggtgggagttttactgcctgcaaatagtgggctaaataacgaaataatccccaccttatatttttaataaggtggggattattatactactctgcaatttcctcatataaaaagtacgttacattataaatatgttctacttcatcgtctgtcataaacagtaattcgtcacgctcaatcccttttttcttttcaataaactcaatcatgtttttgcgttcttctctcttcatcaattttatttctcctctcaatctgttttaatacagtttatttaagttactgctattatataacagaatctttagaaagttccacctattttattgttttttcaaaaagaacttttcgacaaaacaagcccacctaaggaggggcttgttttattttatagtcgtaaaaactcaggctccgtcgtaccggcaccatcaatgtaataaattgtgtcgggattgatttttatcaatacgtaattagggtcttcaggaccgagtaaccaacgttttaagctattattccaaaacttgttttttaatgttgagtcttcctcgattgaagctaacccttcaacttcaatataatcttcatctaatttttttccttcacgtccaagtagtacatgtacatttggatttttttcgatatctgttatcttttttgattttcgatctgttgcaacatatagtacaaaatcttcatggaaaaacatcataaaggcgctatgaggtttctcgttacgtactgtagataatacaccagtacgttgtccttgaataatagttgcaattttctcttttaagtgcatattctttacctcttttcctaatttatattttctctgtttaaacaagataatttaaatatctttcatactgttttctttaagtcgattttttaaacgtaatcgtgatgaaatcggacaagttaggagaagaataataataatattgaggagaaatacatacgatggaaggatgaaaagcatgtttaataaaatatttcttatagtagcacttataggtgtaccactatctgtacttggcaaaacacttcattggccagaaacaattatgttcgctgtgtattgtattacgattatcgcattagctggttttatggggagagcaacagagagtttagcaattgtttctggtcctagaataggcggattattaaatgctactttcggtaatgctgttgaacttatcatttcaatttttgcacttcaagcagggttaattgaagtggtgttagcttctttaaccggttctgtacttggaaatttattattggtaggagggttatctttctttgttggaggtcttaaatacaaaagacaaagttttaatgtatatgatgcaaggcataattcagctttattaatatttgctgttgttgtggcctttgttattccagagatcttttcaatgaagatggacgctggcaagacgtatcaattaagtataggtgtttctattattatgattatcatgtaccttgctgcattactatttaagttagttacgcaccgtggtgtatatcaacataaaagtgacgaagtagcgcatgaagaagagcaagagtggtcaaaagggaaggcgctccttattttagcgatagcaacactggcagtagcttatgtgtcagaggcactcgtacatacttttgaaactgttgcaaagtcatttggttggtcagagttatttataggggttattatcgttgcgattgttgggaatgcagcggaacatgcgtctgcaattattatggcttataaaaataaagtaaatattgcagtcgaaattgcaataggctctacattacaaatcgccatgtttgttgctcctgtattagtattgctatctatgttcttcgcgcaaaggatgcctttagtatttactataccagaacttgtgtctatgattacagccgttttcttaacgattgcgatttcaaatgatggagatacaaactggtttgaaggtggcactttactagcggcgtatgtcattatgggaattggtttttatttattatgaaaaataggcataacaattgcgctcagagaaaacaataaacgaagtagtatatatacctacataggaaggagccagacaggtgaaacgagtatacagcatatgtctttcaactatggtctcgtttattttattatttcctaacatgagttttgcaaagacaacagtaggaacaaaaatgccttcatctgttttaaatatttcaaaagacaatacatttccaaatgatgcgcaagatttgccacgtttacaaccaagtaaatttgctcaagagctattgaaaacggctaatattaaaattgaaaatccagacttaattcggatgtttaatgaaacgacaatttcaaatgcgccgcttgcagtagggtatcgggcaaaaatttatttaggtcaatgggctttacattatgaatcagtagacacatcgattaattgggaatataaacaagtgaatcgaaatgtgtatgataatcgcggaggagaccgtttatatccacttcgctataagcaagaaacacaaaagacggttgaaggcgatttaacagcagatatgaaagatgctgcagatgtgaaaaaaatgatgcttctcaaagcacttgaaaaagtacaattgccgctttcatttaaaacgactattggttatggtacagggcatgagcgtgtgtataatattagtccgagtcaacttggatatttatatgcttatacaccagcagtaaatgaaaaaggaaaagtaacatttggagaagtataccttgtattaaaaggaaatcaaaaaaggcttgttgtaaaaaatattacttctcaaggaatcggtgctgctatcccaattcatgattatttgtattttaaattcatttcttcttcccactcgcaataacatgaaaaaacgtcagcttataagctgacgtttttttataatgtaatatttgctgtttttgataagaaatcttctgtcggatagtagctgttttttacaagaacatttggtccaagacattttactgcaggacagtgacagcttaatgattttgctgtttttgaagcgctccatttttcatacgcttcttgtaatgtgtttgtttgtatgtttcctagaagtggaacatcaccaaaatcagtaacgataatattgccatcaaaaatatttacatttaagcgtgaacgaccatctggatcgttacgaacagttacatttttgctctcttgtaactttttaaatgtggcaatgtctcgctcgtcatcgctacaagcatagaaaggtaaagttccaaataacatccatacattttcatcgcgaatttctagtaaatgctcaatcgcatcacgaatttcagcttttgttaaaatctctagattactcgcgaagtcacttggatacattggatgaacttcatgacgtttacagcccatctcttcgacgatttggcggtgaatatgttcaatatgtggtagagttcttttgtttagcattgtttcggcagatacaagtacacctgcatctgatagagccttactatttgtaatcattctttcgaataattttgcacgttgttcgtaagtaggtttacgctccatcattgcaaatccgccttcaacgaagtcatcaattgttccccagttatgagagatatgcaatacgtctaaataaggaataatctgttcgtaacgtgctaaatctatagttaagttagagttgatttgagtgcgaacgcctcgttcatgggcatattttaagagtggtgttacatagttgtcgacggatttttttgaaagcataggttcgccgccagtaatacttaaagaacgtaaatgaggaatctcatctaatcgttttaataaaagatccatcggaagcggattcgggtctttcggctgtaacgtgtaaccaacagcgcaatgctcacagcgcatattgcataacgtcgtcgttgtaaactcaacatttgttaatagtagtttgccgtactcttcaaggtccatatacgcttcccatggatcgtaagaaggagtaatcggcttcattttttgtgatatcatcatatgaaatactcctttgactattgaaataacaatttgtccattctctataatagaagaatatgtgctttttataaagtgaaactttttagcatgaaaagagagagggcttacattatagtggatgactgtgacaaaattgatgaaatttcatgcccatagcaatcgtttttgcggtataataaaagcaactcgaattaaaaggagagtgccttcatgggaaaagcaattcaagataaagatacacaattagtatatttaaaagaacgtttaaatatgttcattgaagtaattgatacaattgaacccgaagaagtagaattagaagatgtagatcgtcttcttgcaatgttagatgaattagaattaaaatgtgagcaatttaaaaaagacgaataatatattaaaaaggctaccaattccaatttggtagcctttttctgttcgggtaatagaaggacgatagaaaaagaggtataatcaagttgtgaaaaatttcatttatgctctaatagcgtgaaataaatagctaaagagcataacaattgaattttcagctcataacgttttggtagcgttcacaattgagggggaagtaacaatggaaaagcttcaagaaagcatgtatcaactaattgttgaaacgtcaacgaacttaccgaaagatgttcgtcgtgcgattcaacaagcgaaagagcgagaaaatgcagggactcgttctgcgatggcacttggcacaattacaaataatattaaaatggctgatgataacatctcgccgatttgccaagatacagggatgccaacgtttaaaatttatacaccagttggtgtgaatcaattaaagttgaaggaagctatctataatgcgcttgagcgggcgacaaaagatggtaaacttcgtcccaattctgttgattctctttttggagataatagtggaaataatttaggaccaggtacgccggtgattaagtttgaacaatgggaaaaagattatattgatgcacgtttaatcctaaaaggtggtggctgtgagaataaaaatattcaatatagcttaccgtgtgaactagaaggacttggacgagctggccgtgatttagaagggattcgtaaatgccttcttcatgcagtatatcaagcacaagggcaaggatgtagcgctggtgtaattggtgttggtatcgggggagaccgcacatcaggttatgaattagcaaaaaatcaattattccgtacattagatgatgtcaatccagtaccagagttacaacatcttgaagagtacgtattagaaaatgcgaacaagcttggcattggtacgatgggatttggcggagaaacaactttacttggttgtaaaattggcgtctataatcgtttgccagctagtttctatgtatctgttgcgtataattgctgggcatatcgtcgccttggtgtgaaaatccatcctgaaacaggagacattatggattggctatatcaagaaggggaagatacacttcagcatgaagtacaagaaaaaacagagcaacgtgagattgtattagaagcaccaattacagaagagcaaattcgtgaacttcgcgttggtgatgttgtaacaattaatggcatgatgtatacaggtcgtgacgcaatccataagcatttaatggataatgattgtccagtagatttaaatggacaaattatttaccactgtggtccagttgttgtgaaagatgacaatgacaattggcaaattaaagcggcaggtccaacgacaagtattcgtgaagaaccgtaccaaggcgatattatgaagaaattcggtattcgcgctgtcattggaaaaggcggtatgggtgcgaaaacattagcggctttagaagaacatggcggtgtatatttaaacgcaatcggtggtgcagcgcaatattatgctgaatgtattaaagaagtgaaagatgttgatttcttacaatttggtattccagaagcaatgtggcatttacgtatcgacggttttaaagcagttgtaacgatggactctcatggtaatagcttacatgcagatgttgataaaacatcacttgaaaaattagctagctttaaagagccagtatttaagtaaataaaaaatgcatctcgaatgattcgagatgcatttttttggtatatatagaaaaacatgttcagcatgaaagaatgcgttgcaacagaaactacaagtacgattatatatggaaaggagactatttatgaaatataaatggttatatatcggtctcattttttcaattatgatggcacttgttccagtttcagcactggcttatacaaatactccacataactggggaatcccgcgtcctaaaaatgaaacagtaccagatgcaggaaagttatatacagatttactacaaaaaaatggcgggttttatttaggagatacgaagaaaaaagatatttatttaacatttgataatggatatgagaatggatacacagggaaaatattagatgtattaaaagagaaaaaagtaccagcaactttctttgtaacggggcattacattaaaacacaaaaagatttattgttaagaatgaaggatgaaggacacattattggaaaccattcttggagtcatcctgattttacagcggtaaatgatgagaaacttcgtgaagaattaacgagtgtaacggaagaaattaaaaaagtaactgggcaaaaagaagtgaaatatgtacgtcctccgcgcggtgtatttagtgaaagaacgttagctcttacgaaagaaatgggctattataatgtattttggtcacttgcatttttggattggaaagtggatcagcaaagaggatggcaatatgcgcataataatgttatgacgatgattcatccaggatctattttattacttcatgcaatatcaaaagataatgcagaagcacttgcaaaaatcattgatgatttgcgcgagaaagggtatcattttaaaagtctagatgacttagtaaaaggcaatcaaccgtaagcatgtatgcttacggttttctcatgctataatgatgtgtaaaaaggatggggaaacgtatgtggagcgagcatgttacgttagagtatccgtatcattttgaagaagtattaaaacgtttatcttttgatcctcttaacgtcattcaattagatgagaaagttatttatatcccgctttgtatcgacgaggaacaggttgttgttcgcttacaagggattggtactgttcaaaatccacagttttggatttctagtcagacaggagatccagagaaagtcatgaaacgaatgagagccatttttcattggaatgaaccgtttcaagatatacaaaatcattttttaaacacatcattacgtccactatttgaaacatatgcttatactccaattattttagaatttgattattttgcttgtctgcttcgctgtatcattcaccaacaaataaatttgaaatttgctactgtgttaacagaacaatttgtgaaacggtatggaacagagaagaacggtgtattctttttccccactccggaaatagtagcaaatatttcaatagaagaattgagagagcagaagtttagtcagcgaaaggctgaatatatagtaggattaggtcgaagtattgtcagtggtacattaaatttagcgagtatagaaaatgggacggaagaagacatttcagcacaattgttgccaattaggggaattggtgcatggacagtgcaaaactttttaatgtttgggcttggacggaaaaatatgttcccgaaagcggacattgggattcagcgtgcagtgcaaggtatatttcaattagatgataaacctgatgatgcatttttagaaaaattgaaacaagagtgtgaaccatactgcagttatgcagcgttatatttatggaaaagtatagagtagaggtgtaataatgatacaaaagcaacatgagagtaagttggaagttggtcaaacgtttcctgtgacaattaaacgtcttgggattaacggagaaggcgttggttattttaagagacaagttgttttcattccaggggcattaccaggagaagaagttgttgcagaaacaacgaaaattcagcgtggcttcgctgaagcgaaagtgaaaaaagttcgtaaagcttcaccgcatcgtgtgaaagcaccgtgtccagtatatgaggagtgtggcggttgtcagctgcaacatttagattataaagaacaattgaatcaaaagcgtgatatcgttgtacaagcatttgagaagtacatgaaaaatagtatggaagagaaaattcgtccaacgcttggcatggaaaatccatggcattatcgtaataagagtcaattacaagtggggcgtaaagacgaaaaggttattacagggctatataaacaaaactcacatcagttaattgatatcgctcactgtatgattcaacataaagcaacgaatgaagcgacaaaagttgtaagacgtattttagaaaaattaaatgtttctatttacaatgagaaaaaacaaaaaggtttagtacgcacaattgtaacacgtactgcagttcaaacaggtgaagtacaagttacacttattacaacaaaagaagaattaccaaataaagaacaatttattgcagaagtacaaaaacagatgccagcggttaaatcaattatgcaaaatgtaaactggcgtaaaacatctgttatttttggcgacaaaacatttaaattagctggaaaagaagtaattcaagaaacacttggtgatttatcatttgaattatcagcacgtgcgttcttccagttgaatccagagcaaaccgttgttttatataatgaagcaaaaaaagccgctgcgttaacaggcgatgagaaaattgtagatgcgtattgtggcgttggtacaatcggtctttggcttgcaaatgatgcagcggaagtacgtggtatggatgtaattccagaagcgattgcagatgcaagaaaaaatgcgaagcgtcacggatttacaaatacgaaatatgaagcaggtaaagctgaacaatggttaccgaaatgggtaaaagaaggatggcgtccagatgtaattgttgtcgatccaccacgtacaggttgcgatgataaattactggaaacaattttaaaggtgaagccgaaacaagttgtgtatgtgtcttgtaatccttcttcattagcgcgtgatgtacaagcattaatgaagagctatgaagtggagtatgtgcaaccagttgatatgttcccgcatacagctcacgtagaaaatgtagtgaagcttgttagaaagtaaagtttattaatattccctcatggtatgagggaatattttctatgaaggagaatattatgcataattataaattaacaattcagtacgatggcgcacgttttaaaggatggcaacgtctcggtaataacgataatacaattcaaggaaaaatcgaaagtgtcatatctgaaatggtcggaaaagaaattgaaattattggttgtagtagaacagacgctggtgtacatgctttgaatcaagttgctaactttcaaagtgatgagaagttagtggaacataaagtgaaaaaatatttaaatcaatatttacctaatgatattagcattacgaatgtggaagaagtacatgatcgtttccatgctcgttacaattctaaagcaaaaacatatctgtataaaatttggaatgaagagcatacaaatccatttatgcgtaaatacagcatgcatgtgaataaaaaattaaatgtgaaaagcatgaaagcagctgcgaaacatttagttggttcacatgactttactgctttttcaaatgcgaaatcaaagaaaaaatctatggttcgagaagtatatacacttgatgtgatggaagaggcagggtttgtacaaattagagtaagtggtaacggcttccttcataatatggtaagaaaaattgtcggggcattaattgaagttggattaggacaattagacgctgaagcaattccaaacattttagaggaaaagcagcgcaatcaaattaattgtcttgctgaggcaagtgggttgtatttagagaatgttgagttttaatggcaaataaaaaaatcgggctaagtagctcgattttttttgtattacgaagatttctcgttttttatacgtagcttcaaattccaaaaagcagcaagcataatagctgcaaaggagccactaattgttgctaatagctttgcataaggataggcgtttatatcaattagtaacatcatacatacaatggtagggaagaaggctaagtattgtaataactttaatttgttatcattactcatatatatcgctcctttctagtatgttatatgtttattgtagcatattttaccaagtgtttatttgtatgttaaagcagatttatgctgcattaacaagcaataaaagtcgaattgattagggctagcaatccactcatccaagtttcatttcatatgtgtaaatgcagttttttaattcgatattgtaagttttgtctacttaatcctaaaaattttgcagcttgtgagatattcccgtgatactcttttagaatttgattgatgtagtttttttccatttcttctattgtgtgctttaacgttttaggcgtatcagtatcgttattagttaagaaaggttgcatattgaattctttttttattcgttcgcgaaagcgagtgggaagatgaaacgctgtaatgatgttttcatcttcaactaaattcattgaaccttcaatgatatgttccaattctcttacgtttccaggccaatcatatgcatataaaaactctcttacatgcacatctacatctgttacactaagtccgaattgaatattgtatttttcgataaagtgctgaacaagagccggaatatcttcttttcgttcacgtaaaggcggaagacataaagtaacgacgcttaatcgataatataagtcttctcgtaatcgattgtgtgtaatagcttcaagaggatcttcattaatagttgctataatacgaacgtcaatttctttttcttgtgtgcctccgattcttcttattgttttttcttgtatagctcgcagtaacttcgcttgaagtgctggacttaatgaattaatctcatctaataacaaagttcctccgttcgcttcttcgaataagcctgatttatctattgctcctgtaaaggcacctcgatttgtgccaaatagtaggctttccattaaggtatcaggtatagcggcacagttttgtgaaataaagggttttgttgaacgctgactttcattatggatgctttgtgcaaatagttctttaccagtgcctgtttctcctactagaagtatggaggaagatgtacgaattactctttttccttctgtaatgattgattgaatggctttagaatcaccaattatgtgatcaaaggtaaatttggtgctttgttttcgagaaggacccatttttatcgtctgctttaagtgactaatttcttttgatatttcaatagcgcctttaatttttccattttctattatagggaaagtatcgttaatcgttgtaatttcttgtcctttattgttaaaatacgtttgttttatatttttgtttgtttttcctaattttaatgcctctataagagtactatttttattttcttcaaatgcaaatacttctaaaggacttttatataatacatctgagcgttccattgattcaatttccatcattttgcggttgtagataatcgttttactttcctcattaataatatgaatcccgatatcgagctcattgagtaaagtttcatatagcatattcatttcaacgatctgttttaaattaatttcttctgtacgcatagattatcttctcctcatttcaccctatgaagactgactttttataattttattaaaattcttataaaatcgcaaaatttttttgctatttttctcttaaaacttttcaaatgatagaaaaattttgcggttgtgcacacttttttgtgtgaaactctcatttaatatatgaatcagagacttggtacgtattttgcataaataatattcgaaatctctagaggggagaatatgaatttttacaggatatacaacgttttggtgtcaattaataagagggaggaatttataaagtgaagacagttatagaaggtgtgtatagtccttgttatggaaaagtagagaagctatttgttgcggaaagttcatacgtatacgagtgggagaaattagcgttaattgaaacaatagataaacagaaagtagaaattaaggtaggaatcagtgggtatatcgaatcattagaagtagtagaaggacaagccattgctgataaaaagttattaataacagtgagggatgatcttttaataacaggtagtgattaataagtgctatgtatttcactcttttcaataatcatttttattatgaatgattttaaaaacgcttacatgaaatgggtttccaaagggaaaaggggggatttatatgatggatcaaaaccaaggtttaaaacgtgaattgaaaagcaggcacatatttatgattgcacttggaggagttattggtaccggtctttttttaggatctggatatacaattcatgaagctgggcctgggggagcaattgtagcgtatcttgttggagggtttgttatgtatttaacgatgctctgtcttggagagttagctgttgcgatgcccgacgcaggatcttatcaaacgtatgcaacgaagcacatttcccctgcagcgggttatgtagtcggatggatgtcgtggttaaactggtctgctacgataggtattgaactgattgcagttagtattttaatgaaacgatggtttcctgatgtaccgtcatggatttggtgtgtagcgtttgcggtgcttctctttgctatcaatgcattatcttcaagaagttttgcagaagttgaattttggtttgcaagtattaaagtaattacaatcattgcatttattattttgggcggggcagcaatgtttggttttctagatatgaaaggaaatgaaccagcaccaatgttctctagttttactgattatggtggattgtttccaaatggattatccgctattttaattacgatgattgctgttaatttttctttccaaggaacagaactagtcggtattgcagcaggtgagagtgaaaatccagaaaaaacaatcccaaaggcaattaataatacagtttggcgtatactcgtgttctttgtattatctattttcattcttgcaggattattcccatggcagcaagcaggagtgatagaaagtccattcgtagttgtatttgataaaattggtattccttatgcagctgatattataaacttcgttattattacagcagtactatccgttgcgaattcaggattatatgcaacttctcgtatgctatggtctatgtctaatcaaggaatgattagtccgatttttggtaagttatctaaaaatggtgttcctatttatgcattgattgtaagcacgattgtaggctgtctttcattactatcaggtatttatgcggaagatacagtttatttatggctactttctattgccggatttggggcgatattagtttgggcatctattgctttatctaacttattagctagaagggcatatgttaagcagggcggagatgtgaaggacttgaaatttaaaacaccgctatatccattcgtaccacttctggcattagcattaaatataacagttatagttgctatggcttttatcccagagcaaagaatggcgttatattgtggaattccatttatgattgtttgtttactgttttaccgtgcgacaagaaataaggtacgtaaagtagagcatattgaaaagatcaatacaacaaaagtagaaagtttataatattgagtaatttggagactgtaaaattgtaaacagtctctttttttgtgaaaataaagctggaaacatactatgtatgcaaaggggaattagcgatgaatcaagaagtttcacagctattagaacagattgatttacgaaaagatgagttactagagcttacaaaaaccttaattcgttttgaaacactagcaccgccggcgagaaacacaaatgaggcgcaagaatttgttgcagagtttttaagaaaacgaaattttagtgttgataaatgggatgtatatccgaatgatccgaacgttgttggggtgaaaaaagggatagaaagtgacacacataaaagtcttattattaatggacatatggatgtagctgaagtgacagcagatgaggcgtgggaaatgaatccgtttgagccatttataaaagatggttggttagttggacgtggtgcggcagatatgaaagggggattggctggggcactatttgctattcagcttttacaagaagctggcattgaattacctggagatgtaatctttcaatccgtaattggggaagaagttggagaagctggcacgcttcaatgctgcaggcgaggttatgatgctgattttgcagtcgtagtggatacgagtgatttacatatgcaaggacagggcggcgtaattactggatggattactgtgaaaagcccgcaaacgtttcatgatgcaacacgtaggcaaatgatccatgcagggggacgtttattcggagcgagtgcgattgaaaaaatgatgaaaattgtgcaaagtttacaagaattagagcgccactgggcagtcatgaaaacatatgaaggctatccatctggaacaacaacaattaatccagctgttattgaggggggaaggcatgcggcgtttattgcggatgagtgccagttatggataacagtgcacttctatccgaacgaaacacatgaacaaataataaaagaaattgaagagtatattggaaaggtagcagctgccgatccatggttaagtgaaaatccgccacaatttaagtggggcggagaatcaatgattgtagatcgtggtgaaattttcccttcattagaagtagatagggaacatgcagctgtaaaaaaacttagctcagtacacgagtctattttatcaaaaaatgcaattttagatatgtctgcaacggtaactgatggcggttggtttagtgagtttcacattccagcgattatatatggaccaggtacattagaagaagcacattctgtaaatgagaaagttgaagttgaacagttaattgaatttacaaaagtgataacagcatttatatatgaatggtgccacacgaaaaaatagatttgtatagtaaaatcgtacgagtatgtatacttgtacgattttttattgaactatttcagagttgaatataaacaactgaaatagttctttattttgctatgtctttcgttttatttcaagtaatttctcttttgctaattcaacggcgatcgcatcatctaaatagccaattggaaagagatagtcgggaataatatctgtcgataaaatgaaataaagtaatgcgctcccaagaactgcacgttcttcttttgaaatggtttcattgcaaaattgttgatacatatctgttaattgttcaataaaaggacctgcactatcaatttgctctaatttgcttgcgaaactgttatgaatacgtttttcaccttctgttgtctgggcatagcgttcgtaattttcgagttcttgttttacgcgagttgtagtgtaatcgaaatcgaataagttagaggattgcagcgtttgctgaatggtatcaagagatgtgtacatatctgttttttctttatttatgtgaggagaatcagggtacatttcatcaaataacaattggggtggaacttgaagacattctgcaaatttttgtagatgtttttgttttggcggttgtttgccattaataattcttgagactgttgcaggatcaatatttgtaagtattcctagttggcgcatagataaggcgcgttcttttaaaagtttttttattaatttgccaagccgatcattcgggttttcattagccatagtgtaggcactccttttttagtgttgaaaaaatattgagcatttattacaagtatatgaaacagacaggcacagttgctcaacattttcataatatgcattgaaaagtgagaaaaaggggtgactatttatgagtacggtaggcttattttcaatttttttaatcgggatcgcttctaatttagataatgcaggtgttggaattgcatatggcattcgtaaaattcgtatttcgtggtttaacaattttatcattgcattctttggatttttatttactttactagctggattttttggaaactggattgcgttatttatttcagagtttacagcaaatctgattggagcaatctttttagggataatcggtgtgtttattttatgtcagcctttcttgggccaaaaaaatactgcaggttctaaagatgataatgtacttatgggaattttacgtgatccggaaaaagcagattttgatggttctaaaacaattagtttctcagaagcaattgttttaggagttgcgttgtctattaataatattgcaggtggatttgatgcaggggtaacaaatttaaatctttggcttacagcgactatttctggggtgtttagttttatttgtattagtggttttgcgtatgtaggaaaacgatttttagcagaatacttagggaaatgggcgacagttatcgcaggagtgttattaattcttattgggatcgatcagttgttgtaaggagagtagaaaacaaggttcgagtatttccttggaaatacagcaagagattgcatatatcgacgtacttttctccatactaatacggatttcttttaagaaagggggatttgtatgggacgcgggaaagcatttgatcataagaaaaaagggcatgatcatcaaccacctaaaggtgcgttcattcataaagatgtaaatgaacatactttggaagaggaagagctaccagtaaatattgaggcgtataaaaatagtttaaaaaaacattaaaagcacctacataggtgcttttttaccgtatatcttcaattaattgttcggattcttcatgcatactgtactcacttaatacttgaatgcaaagccactttaattcttcaatcgtatgctcaagttcttcaggaagcacatgataaatgtcttcaagtcccatcccgaaatgaataagttcaagtacttgatcatcgatgttccgatccattaataattcaagtacttctaaattgaatatgtatcggtgagcttcgtcgagtgaaacaacttttaacttcaagctttctacaatactcaatataaaaagaaggattgttttttcaagaacaggttgttttcccatttgaaatattagtttcatctttcacacctccacatatagcgctaggttgtactatattattcaggaggggggaacaaatatgcatgatatagagaaactttcagcactgtttttgtaagaggattgataactgacaaaagtgaggttttggcgaaataaaaaatcctgctagtatagcaggataactcgcgattaaaaaatgctccaaccttcttgagcagaaagaagttcaagaattttaaaaccggcaatactatttccgtttgcatctaaagctggtccgaaaataccgattcccatgtctccttttacgcagccaaaaataccaccggctacaccactttttgcaggaataccaacacgaattgcaaattcaccagattcgttatacataccacatgtgaccataaatgttttgcaaatttttgtaatatgtttagggatgatttgttttttcttatatggatcatatccatccattgcaaaaattaagccgatacgtgctaaatcgatgcagtttacttcaactgcgcattgacgagtatataaatccataagttcttcaatatcacaatcgataattccgttttgtttcatataataacaaagtgaacggtttaggtaagctgtctctagttctgaatcggcaactttagaggaataattaatagtaggattatctgttatttcacgtacaaaatgaagaatacgttccattttttcctcgttatcttttcctgctaacatgcttgtaatagctaaagctcctgcatttatcattggattaaggggtttggacggacttgtcgtttctaacttaataatagaattaaatgggtcacccgttggttccattccaactttagaaaatacatattcttcaccacggtctaaaagggcaagggcaagtgtaattactttggaaatactttgaagagtaaatagtgtttgtgagttacctgcatggatatattctgtttctttatggaaaatggcaatccctaaatcgtctggatttgcatttcctagttcggggatataagtagcaagttttccttttttcgtatatggttttacttgttctaacaactgttgtaagttgtttgtttcaatgcactgcatagtaccaacgctcctattttgaattaactaagtttacttttcccgatatgctcggaaataaataataacatgaaaaagtggaatgataaaacgaaagttcaatgtgctataataggtctttcgtttcgagtattctgtattttaaaaaggagaattttccttttatataacagtttggaaataggagatttatccataaaaagttcagaaataaaaactacacatctatacaactatatgttattatggttatgtaatagaaagcgttttctaaagcgtacttataatgataacgatttcataaatttgattagggggaattaaaatgttgcagtttttacaacgtattggtaaagctttaatgcttccgattgcagtactaccagcagcaggattattgcttcgtttagggcaaccagatgtatttgatattcctgttatggcacaggccggcgcagcagtttttgataacttagcacttatttttgcaattggtattgcaatcggtctttcagtggatggtagtggtgcagcaggtcttgcaggtgcaattggttatcttgttatgaaaaatagtattgatgcacttagcaaagggtattcaactgctgaattacaaggtaaattaggtaaagtccaagatttaataggtaatagcgcaaatgtagatccatctaagcttgcggatacaatgacacaagtatctaaggctgctgaattatcgactaaagtagatatgaaagtcttaggtggtattattgttggtgttatagcaggacttctttataataaattccataagattaaacttccagaatggttaggtttctttgctggaaaacgtttcgttccaattgttacatcagttgtgatgctgatattaggaattctatttgcacaaatttggccaacaattcaaaatggtattgatgcattagctcatggaattgttaatttaggtgcaattggttcaggactatttggtttattaaaccgtttattaatcccaattggtttacaccacgtaatgaacacatacttctggtttgtatttggggactttacaaatgcagcaggtaatgttgttaatggtgatattgctcgtttccttgcaggtgacaaaacagcaggtatgtttatgactggtttcttcccagttatgatgttcggtttaccagcagcatgtttcgcaatgattgcagctgctaaaccagaaaagcgtaaagcagttactggtatgttagctggtctagcattaacttcattcttaactggtattacagagcctattgaattctcattcatgttcttatcaccagtattatatggtattcatgctgtattaacaggtctttctttattcattacaacatcgcttggcattcatgatggtttctcatttagtgccggtgcaatcgattacgctttaaacttcggtattgcaacaaaaccagtcttactagcaggtattggtttaatttacgcagcaatttatttcatagtattctacttcttaattaagaagttcgatttaaaaactcctggtcgtgaagatgacgatgagttagttgaagatggtgatgcaccagttgcaggttcaattggtgaaacttacgtagcagctttaggcggaaaagaaaacttaacagttattgataactgtgcaacacgtctacgcttacaagtaaaagatgctggtcaagtaaatgaagcagcattaaaacgtgctggtgcaaaaggtgttatgaaattaagtaatacaagtgtacaagttatcgtaggtacaaatgttgaatctgttgccgatgatatgaaaaaacacgtataaataatgagataagaggatgtccaaaaagattgataacatcaattttttagaggatatcctcttttttttgttaataatttaacgggaatcttacttttgtaaattttctttttcttttttgtacatataggttggtaatatgtgcagtgcgtgataaagtagggatgatatagaatggattatccataatctactaaaataaatctttaatagaggaattaaattattggtgagtaaggggaaaaaagcaattatggatcaggaaaaaaataatgcgaatgggaaagtacgtcggccgattgtatacatcaaaagaacaatcattctcgtcttactattatcacttgtatatttcatgtatacaaaaattgttgcgcataataagaaagaagaaactttaaaagcggcagcagaaatgaagaaacaagaagagctaaaaaagaaagaagaaaaaaagaaacaagaagtacagaagcaaaaacaaaaagagcaggaagaacaagtgaagcaagcgcaagttgcggaacagcctgctgaaggaccaactcaagaaattaatgaaaacgctcaattggaccagtatttaaaaaacgcaggctttagcgggacagctgttattgtgaagaatggaaaagttcttttgaataaaggatacggtatggcaaataaagagcagcaagtaccgaataattcagagacgactttttatattggttctatttcaaaggcgtttgtagcaactgctattatgcagttgaaagatcagaataaattacaagtagaagatactgttgcaaagtatattccaaatttcccacaaggtaatagtattcagctaaaacatctattaacacatacatcagggattcccgaatatgagcagggaaaagaagatatttctcatgaagaactgataaagcggataggaaatcaaaagcgtattggtggtccaggagagaaatggaagtattccgattcgaactactccgtacttgcatacattgccgagaaggtaagtggacagtcgctcgaagaatatattaaacaacatatttttgctactgcgggtatgaaacattctggttttggcacagcgttagaacaaacaagattcccatcaacgggttataaaatagtaaataataatatgacaacacctaatattccgagcatgtcacaactatatggttgtggtgatatatatacgagtgcacatgatttatatttatttaacgaagcgttatactctggaaagttaatttcaaaagcaagttacgatcaaatgtttacagccgtgaaaaaggattacggatttggctggtacgtagacccaggaagctattcgaatcatggtgtaatgccaggttggaattgtttaaatggatttagtaaaaacggtagtgtgtacgttgttttattatctaacattcaaaacaatattaaatcatttggtaaagtgaataacgatatatatacgatgttaagaaatattgaagtgtaagaaactatccttttggatagttttttttatgccctgaaacaaatatttcttttagaaaatgtatgtcttacctatcacaaaaatatctattttgtatacattaagatgtatggatgtatttttataatttaaaaataataggaggagaagtatatgtgtctgttcagtaattattggaaaaagttatcaagattgtttaatagacaattagattattttttagataataagttattgcctgctgtggaaagacttttattttcgcaaaacttcgcgaggtttattcaaagaaattccaagcaagctacagaagaatttattaaatcaagtcaatttcaatcgattatttgtaacattttaaaagaatgtaatacatcaccttttaaagaaattgcagagcagtatttaggtaaaaacgtagaaattactgtgacagtgggacagttaacaggcgttattgtagcagttggtgatgacttcttaacattgcaagaaggaataggaacagaagttttattaccatttacaagtattatatcaattaaagaagcgtaagaaaggagacttatatatgttatttactgaagaattacgtaaccatgttggtgagttagtgcaagttgtgacagcggccgaaattgttgcaggtattctgttatctgtgacagatggagcagtaagtgttcgtacttctccttcttatggaccaccggaagatgtagttgtacgtattcctattatttcatatgttcgcttggaagggtaagagtgatacaagtatgagagtgtcagttgttattccagtgcataatgaagcaagtactttatcaaaagttttagtagaagtaagaaagctcgaaccatatgaaattatcatagtagataatggatcgacagatggtacgaaagaaatagcgctacagcataattgccgtgtaatttattatagatattcccttggtaatgatgtgggacgggcaattggtgctagagaagcaaaaggtgaaattgttttatttttagatggtgatatcgtcatgaaaagtgaagaattatacaattttattaaaggaatacagcaaggacatgagattgttttaaataatttaacatggtccgtttatttgaagatgagaccgcattatacgacggttggaaaatatatgttaaatcgttatttgaacaagaaggagtttgttgtaggatctttaattgcaataccacatgcgataagtcgtaaagtgattgaaaaactggggtggtggaatttagcagatccagcattatttcaagcgatggcgatgtctagaggagtagatatttctgatatggcttcagttgatgtcatttacacaaataaagttcgtcctgtccatacgggcgcatcacctggctctccttatccgaaagcgactagtcgtattatgggtgatcatttgcgtgctttacaatacgtaatcgaaacatacggtaatcgcggtggtttttcagaggacaatagagatagagcgtttgtaggaaagtataaaccagttttattacaaaagaaaaaagcgaaatatagtgccattatcccggtatcagaagaaaaaataactataaggtctgttatacaagaagtgaaagaagcaggtgtagatgaaattatagttgtcgcgaatggagcagatgttgagactgttaaacaggcaaagctagagaatgttattgtagttgaatttacgaaggcgcttggacataatgtagcacgagcaataggggctatgcatgctacggcagatatttgtttattcgttgatggtgattttgttattccagcaaaaaaactcactccatttttacatgctgttgaagatggaaatgacgtggtgttaaatgatttacaatgcttattagatatgtttcatccagcagatccaattagtatgggaaaatactttttgaatttggtagcgaaaagaccagatttatggaataactcactaactgctgtaccacatgccatgcataagaaggtaatagagaaaataggatatgacgcccttatcattccgccattagcacaagtgaaagctattttagaaggattctctattacaacagtagagttagtagatgttataaaaacaaatcgagtacgtccagagcaacacgaatttgtaaatgggcgtatttcagcgtttgatcgtattttcggtgatcaacttgaggcggttacgtatttattacaacgtacggatgaacgtggtggctttactgatggagatagagatagagatatcattcaacaattgagaagggaagaagagaatacaaatgaatagtagtaaagtagctattattgggttagggtatgttggccttcctttagcggtacattttgcagaaagagggcatacagtacttggattagataaagatattagaaaaatagactcaattataaaaggagaaagttatattccagatgtttcttctaaagagttacaaagtttattgacgaaaaaaaaattaacagtaaacacaccggatcaaggcattgctgattttcaaagtagtgattatgttattgtcactgtcccgactccaattaatgaacaaagagaaccagatttaagtgccctcatttcagcttcgcattatatacaacaaaaccttcaaaaaggacaaaccttcatttttgaaagctccacatatccaggcacacttgaagaagtcatcatacctattatttctcaaaatagtaacaaggtaggggaagatttctatatcggatattcccctgagagaattgatccagcaaatagtcaatattcagttcaagctattccaaaagttattagtggacaaacagaaaagtgtagacaaaaggtacaggatttatatagtaccatttttgacgaagttgtacctgttagctctccgaaagtagcagagatgtgcaagctatttgaaaatattcagcgcttagttaacatttctttagtaaatgaactaaacacactatgtgaaagtttaggcattgatttttatgaggccattgaagcggcatctacaaaaccatttgggtttactccatattggccagggccagggatagggggacactgtattccagtagaccctttatattttcaatggagaataaaaaagaatggggcaattagtcaattaattgaggcagcacatataattaatgaagaaatgccagagaaaatggtccggaaagtaaaaagtgtggtgcaatcacctgcaacggtgttaattgtagggattgcgtataaaaaagatgtaaatgatttgagagaatcaccagcgttaccgattattcaattattaagaaatcaaggatacgagatagaatatcatgatccttatatttctttcgcggaaattggagataaggtgtatcaatctgtttctttagatgaagaaaaagttaaaaaagcggattgtattttaattttaacggatcattctaatattgattggaagctttttaaaggaatggaccgagtaatagatacacgcgggattgtaaagaaggtgagtaaatgagtaagaaatgtttaattacaggtggggccggatttatcgggtcgcatttagctgaagagttgatgagaagaggttatgaggtcactgttgtggataacttttataaaggtaaaaataagtaccataaagagttaatgaaaaaaatccgtgttattccaataagtgttttagataaaaattctatttatgaattagtagatcagcatgatgtcgtgtttcatttagcagcaattttaggtgtgaaaacaacaatggaaaaaagtatagagctcatagaaacgaattttgatgggacgagaaatattttacaagcagcgttaaaaggaaagaagaaagtagtttttgcttctacttcagaagtatatggtaaggccaagccgcctttctctgaagagggagatcgattatacggggcaacttctaaaattcgttggagttatgcagtttgtaaaacgttggaagagacattatgtttaggatacgcattagaaggtttaccggtaacgattgttcgatattttaatatttatggtccaagagcgaaagatggtccgtatgcaggggtaatcccgcgatttattagtgcggctttgcaaggagaagacattctcgtatatggagatggaaagcagacacgttgttttacgtatgtgagtgatgcggtagaagcaacaattcgggcaatggatgagaaggtaaatggtgagattattaatataggttctgagaatgaacagagtataaaagaagtagcagaagtaattaaaaaattaacgaattcttcttcgaagattgtacaagtgccttttgaagaagtatatcctcatggttttgaagaaattccaaatagaagaccagatgtaacaaaattaaaaaagcttgttcaatttcaggcgaaagtaacgtgggaaaacggattgaaggaaacaattaagtggtttcgtgaacaaaacaatggctaagtcattatctgttattattcctgcatgtaatgaggtcgatacgatttcagacgttattcaatcggtaagaccattaaatccagtagaaattattgtagtagcaaacggttgtaatgatggaacagaagatgttgcagatcgtttagggtgtaaagtaatcaaacatacagagctactagggaacgatgttggacgtgcagtcggcgcaaaacatgcgataggtgatgtattactatttatagatggtgattttgctattcaaacttcaaaattaaaattattccttaatccgattttatacgatcaggcagatgtagttttaaataatttggatgcattatttttaaaaaggcaaaaacctacttctattacagtatggcgccaaatattaaatgcaatgttagagcgtgaagaattaaaaattaattctttattagatgtacctcatgcgctgacgaaagaagtcgttcaaagcatcggatatgaatgttttgttaatcctattgtggctcatttacgcctacttcaaagtaaatggagaattagtcgtcattgcgccattgacgttattacgccaaataaatttcgtccattccagcatgctgcatatggaacaaatctttcccaatctgaaaaaagaatgataggtgatcatatagaagcagtagcggcacggatattaagcagtgatgagcgcggaggatattatgatggaaataggaaaagggatagtgtctatcatactttaagttttgaagagttttatcaaggatggggcgtcacatctaatttgtataaaggaaagcaactatctgttgttattcccgtacaagatgaagagaaaacaattggaaacgttatagaagagcttcgcaaaattgaacccttcgaaattatcgttgtcgtaaatggttcgtcagataaaacgaaaaaaattgcaaaagacaaaggggcaacgacaattgtatataaagaagcactcggaaatgatgtagggcgctcacttggaacttattttgccaaaggagaaattgtgttatttatagacggcgattttattattccagcgagtgagctatatccttttgcaaaagctatagcagatggaaaggacgtcgcattaaatgatttaaatcactatttagatttaagagtaccacttcatcttgtaactgcatttaagtatgcactaaatttagcttgtgatagaaaggatttaggggtaggctcacttattgcggtacctaatgcatttagccaaaagtgtttgaaagcaattgggtataaatctttattgtcaccttgtgtagcacaagtgaaggctcttctgtctggatttgaaattgcatgtgtatatcgtgttgaggttgataagatgaaccgtattcgtcccagtgaacatttcgcaaaaataggtcaccctccagctgtacttcgaattataggtgatcatatagagggactagagcaaataatttcattaacagacaatcgtggcggattctatgatggcaatagaaaaagagatgttttatagaagtaacaaaaaagtgtacaacatgtgtacacttttttgttctgttataaaaactataacagattaggagataagagtattacagctctacaatgggtattgttcttatattacaaaataggactcgtatataaggataccaaaaaaatacaattaaggaaagggttaattttaaagacttttaaatgaagttaacactatatatatagtagtttgctcaatatttcacaaacatgtcacaactatttcgttcactttcgtaaaaaagtagtattctaagtgtgtaagctgttatataaaaaatcttagtcctgtactaatcaaaaatggaggagattaggatgactcaagtattagaaaatgttaaaaacgcatgggaaaactttaaaggtgaaaaatggaaagcagagattgatgttcgcgatttcattttaaataatgtaaacgttttcgaaggagacgaatctttcttagcagaagcaactgaagcaacgaaacaactttgggatcaagtaatggatttaacaacgaaagaacgtgaaaacggtggcgttcttgatatggatacaaaaattgtttcttctattacatcacatgcccctggatacttaaataaagatattgaaaaagtagtcggtttccaaactgataaaccatttaaacgttctttacaaccatatggtggtattcgtatggcagaacaagcttgtgaatcttatggatacgaaatggataaagaacttagtcgtatttttagagattggagaaaaactcataaccaaggtgtatttgatgcatacacaccagaaatgagaaatgcacgtaaatcaggtgttattacgggtcttccagatgcatacggacgtggacgtattatcggtgactatcgccgagtagcgttatatggtattgatcatttaattgaagcgaaaaaagctgatttaaatttaactggcggtgtaatgagcgaagatacaatgcgtttacgcgaagagttatctgagcaaatgcgtgcacttcaagagttaaaagaaatggccgcttctcatggcttcgatatttctaagccagcaacaaacacgcaagaagcattccaatggttatacttcgcataccttgcagcgattaaagagcaaaacggggctgcaatgagtcttgggcgtacttctacattcttagatatttacattgaaagagatttagcaaatggtactttaacagaagaagaagtacaagaaattgtagatcacttcattatgaaattacgtcttgtgaaattcgcaagaacacctgattataatgaattattctctggtgacccaacttgggtaactgaatctatcggtggtatggcattagatggtcgtccattagtaacaaagaactcattccgtttcttgcatacattagataatttaggaccagctccagaaccaaacttaactgttctttggtctaaacaattaccagagaactttaaaaactactgtgcgaaaatgtctattaaaacatcagcaattcaatatgaaaatgatgacattatgcgccctgaatacggcgatgattacggtattgcatgttgcgtatctgcaatgagaatcggtaaacaaatgcagttcttcggagctcgtgcaaacttagcgaaagcattattatatgcgattaacggtggtaaagatgaaaaatctaaagcacaagttggtcctgagtacgcaccaattacttctgaagtattaaattatgaagaagttatgcataagtttgatatgacaatggaatggttggcgggtctatatttaaacacattaaatgttatccattacatgcatgataaatatagctatgaacgtattgaaatggcacttcatgatacaaacgttcttcgtacaatggcaacaggtattgctggtctatctgtagtagcagattcattaagtgcaattaaatacgcaaaagtaaaaccaattcgtgatgaaaatggtattgcagttgacttcgagattgaaggagatttccctaaatacggtaacaatgatgatcgtgtagatgagattgctgtaaatcttgtaaaaacatttatgaataaacttcgtaaacataaaacatacagaaattctgttcatacaatgtcaatcttaacaatcacatctaacgttgtatacggtaagaaaactggtaatactccagatggccgccgtactggagaaccatttgcaccaggtgcgaacccaatgcatggacgtgatacaaaaggtgcattagcttcattattatctgtggctaaattaccatatgaagatgcacaagatggtatttctaatacattctctattattccgaaagcacttggtaaagaagatgatgtacaagtacgtaacttagtatcaatgcttgatggctatgcagtaaaagaaggccaccacttaaatattaacgtatttaaccgtgaaacattaatggatgcaatggaacatcctgagaaatatccacaattaacaattcgcgtatctggttacgctgtaaactttattaaattaactcgtgaacaacaaattgatgtaattaaccgtacaatgcatgaaagcatgtaaatgaaaaaagtgtcccttcgctcttaatatatagcgaagggaggctgtttcaataaaggaggaagtaacatggtaaaaggaagaatacattctgtagagtcttgtggtactgttgatggcccagggattcgttatgtcatatttacacaagggtgtttattacgttgtcaatattgtcataatgctgatacgtgggaaatcggtaaaggtaaagaaataacagttgaagaagtgatgcaggatgtgacatgttaccttccatttattgaagcttccggaggcggtataacagttagcggtggagagccattattacagctagactttttaattgagttgtttaaaaagtgtaaagaggctggtatccatacaacaatcgactcttctggtggttgttattctgaggaaccagaattccaaaataagctagatattttaatggattatacagatttagttttattggatctgaaacatatcgattccaaaaagcatcgtaaattaacagggaaaccaaatgaacatattttacaatttgctcgttatttatcggataagaataaaccgatttgggtacgacacgtattagttcctggtgttacggataatgaagaggatctacaaaaactatctagctttattcaaagtctgtctaatgttcaaaaagttgaagtgttaccatatcataagcttggtgtatataaatgggaggcgcttggacacaagtatccactcgcaaatgtagaaccacctactgagaaaaatgtagaacatgctaaatatattttacaagcggtctaatccaaatattggattaggctttttgctttctttacaataaaatctagagtatatattgataaaagagtatactgaaaatagaatatccataattttgtacggaataaatggagaaatttacataattgtaaagggaaatcaaaatagtaaaaagaattaagaagtaaaagagtgagtatcatggaatagagaacatttgtaagttattgcgaaagctcttataggaaagtataatgtaaagatatgagcacagataggattaaggggtcaatcttatatgctttgcatatccacgacaggtacatagctgaaagggaattattagaatctgtttatgtaatttttaaggaaaatgtttttcctattgtcgtatatgcaatatggagaaacaaaaagctaggagtggatttgtttgataaaaaaccccaaggttttaatattaactgcacattacggtaatggtcatgtgcaagtagcaaaaacattagaacaaacatttcgccaaaaaggaattgaagatgttattgtatgcgacttgtttggagaatcacatccatttataactgacattacaaaatatctatatttaaaaagttatacaataggaaaagaattatatcgtttgttttattacggggtagaaaaaatttatgataagaaaatagcatcttggtatgcgaactttggaaggaaacgtttgaaaacacttttacaggtggagaaaccagatattgtaattaatacatttccaattatcgctgtaccagaattaaagaaacaaacaggtatttcaattcctgtctataacgtattaacggatttttgcgtgcacaaaatatggattcatcgagaagtagatcgttattttgttgcaacggatcatgtgaaagaattgatggttgatatcggtgtacctgcggaacaaattgttgaaacaggaattccaattcggagtagttttgagttaaaggtaaatccagaaatcatatataataaatatcagttatgtaagaataaaaagattttactaattgtagcaggtgctcatggggtattaggaaatgtaaaagaactatgccaatcatttatgtcagtgcctaatttacaagtagttgtcgtttgtgggaaaaatgaagctttaaaacaggatttattaagtttacagaagcaaaattccgatgcattaaaagtgtttgggtatgttgaaaatattgatgaattattccgtgttacttcttgtatgattacgaagccaggcggaataacattaagtgaagcagcagcgttgcaagtacctgtcattttatataagcctgttccaggacaagaaaatgaaaatgcgatgtactttgaaagaaagggagcagcagttgtcattcgcgatgatagtgaggtttttgcaaaaacagaggcattattacaagatgatgtgaagcttcttcaaatgaaagaagcaatgaaaagcatctatcttccagagccagctggccatattgtagatgcaattttggcggaaaatcatgcagaaccgcgtcatatacctattaaatcacctgctcttgcacaatcttttacttaatatgaaaccctctttgtatatgtaaagagggttctttattatttttaaaggaaatttagtgagttatccacaaaaggattgcgctttcattaaacagtaaagtcggaatattaacaactatatccacattgtccacaatttttagaaaaatatccacaattaaaacagctgatatatgctttaatatagaaaaatattaaatgtttttgaaaattactaacaatttcatcggttttgtggataaagttgtccacagcaaaaaagtcccttatgtataaggggcttttttgcttacttctatcagtcgagaaaattatgtaatgaaaatgaataattaggggggaaacttctaattattcattttcactttaaatgcttttcgagcgatatcctgctgcacgatctgctttttgaaattcgcgttgatagagaacttcttgtgtactagataatgtgttttttgctttatcacgtttctttttatccattacaaatcacctcgtgtcttaaagttactatttatcgtttccaaagacatgaggggatatacgcatatggaaaatgttaacgattgattatcatttcagaaaatttagattacgcttcttttaattgatgagcatcttggaaggttgtatctcgcattgtagcaagtgtgtattgatcttttggaatttcatataagttatacacttcttcgtttgcgttaatttcatcatatacggcttttcttgtttcgtttgctagattcacatattgcagtttttctgcagctttaatagaacgaatatttattttacgaatacgcatgaaaattgtttcaatatctaattcatagaaaagttcactaaaaaatgaatcttttgccaatttgttatagccttttccatgatatggtttgccaagccatgtcccgagaaatccagctttttcttgcacatcaaataaagtaattgttccgatagggttaccccattcatctaaaattgtgcgtgaaattaattcaccacgctcttcagcttcaatcgtttgtttcgttaagaataaatattcttcataagaataagccttttgacgcacaaaagggaagacagctggatccaccattaactcgtatagaacgtggctgtcgtgtaagtcgcgttttttcaacatactaactcctcctcacacgagggtagcatgacgaaaaaacaccccaccctcgaaatttttatatcaatctttaaaaaatttcggggtgggaatcgaacccactagaaccagtttctaacgctggtggcgcaccatttgccttccccattcatcaatttgaaaatgataatcacgacacaaattgattatggtttcattcagtttataatcgtataatactttatctagtcaaaaaaataaactagttttttttattttttttgtaaattatttttccatcaatcatagttagtacaggcttggctaaataatggaaaggatgatgagtccatagcacgagatcggcgtcttttccaacttcgatgcttccaattctatcctctaaacgcaaatttcgtgctgggaatatggtgattccttctagtgctgttttctcgtctaacccttctcttactgcaacagcagcgcaaacatttaaatattgaatgggtgtataaggatgatctgttgtgatagaaacttccacaccattttttgataatatatggtaagtatcccatgttttattttttagttcgattttagaacggcgtgtcagagtgggaccgactgaaaccttcaaattgtgttttgaaagttcttcaacaataaagtgtccttctgtgcaatgttcaatgcgtaaatcgagattgaattctgttgcaaagcgtagagcagaactaatatcatctgctcggtgagcgtggatacgtacgggtatttcacgacgtaatgcttttaaaataggaagcattcgaaaatcagcttcgtgcccgtagtgttgtgcttcatagaatgattcccgaagtaaccccataatccccatacgtgtaatggattcttttgttccattactatggacttttttaggattttctccaaaggcaatctttaaaccagcaggttcttgaataatcatatgatcaatacaagttccagctgtttttattacacaagtagtacccccgataatattttgactgccaggcataacgtgaacggttgtaattccgttttgtacagcgtcttgaaaggcaatatcgaaaggatggattccatctaaagaacgaatatgtggtgttgaaacttcagatgtttcattggcatcatttccagcccaaccagtaccttcatcatagagaccaaggtgagtatggacatcaataaagccaggtaagagatggagtgctcgtgcatctataacggtcatatcttgagtaggtggaataaaaggtttgacctcggtaattcgctctcctgtaacgagtacatctccttgaaacttttgagatgtaatagggtatacaatggcttgtttgagcaatattttcataggtacctcatttctgttactttataatgctaatggaagttaagggaaagtaactgaaaggttatttgtatggtaatgcttcggatcctagaaaatgaaagttttgaaagagcccatgtaaaattgtgttttagaagtactacattgtatgcgaaagtatattttgtaatgcatggtctatttctggaaatgtgtattggtatccatgttcaattgctttaatgggtaatacacgttgcccttctagtacaagtatgctcatttcacctaataaagtttgaatgataaaagaaggtacaggcaaccaatgaggctttttcattatagttgcaatggtttctccaaattccttcattcttataggtgttggtgctgtcatattaagaggaccatcaatttcttttttgtgtataatgaaatccatcatacgaacgacatcgtctatatgaatccatgataaccattgcttcccagaaccaatggtgccgccgatatagaattgatagggaagtagcatttttggaagagctccttcatttgcacctaatacaactccaaatcttgcgtagattgttcgtattccgagagaacgtgctttagatgcttcttgttcccatgaatatactgtatttgctaaaaagtcatttccaggagtctcatgctgttctgtaaaagactctatttcagacgttccatagtatccaatagcacttgcgttaataaatgtgtgtggctttgtatggagtccctgcaattgtttaatgagtccttttgttgtttgaattctactgtttaaaatggctttcttttgttgctttgtccatctactattaatagactctccggctagattaataactacatcaatagaagagagggggaaggtttgtaaatctggtgtccattgaacatactgaaggttaggatcggaagtttcagtagttttttttcgtgtgagaatgtaaacagtatatcctttttgaataaaaaaagtagaaagggatttaccgataaagcctgtaccaccagaaattgcgattttcacaagtatttcctcctcattatatatattcttgaaaagaaaaaatgttcctcgactatgttaaaataatagagaggtgagagtatggctgtcattacaaaaatagaagtacaaaaacgatcgaaagaacgatttaatatttatattgataaaggtcaaggcgaagagtacggatttagtgtggatcaagtaatcttaataaaacatggattacaaaaaggcttagaaattgatgaaatcgagttaggaaatattttgtacaatgaagaagtgcaaaaagcatatttacaagcaatctcctatttatcctatcaaatgagaacaaaacaagaaatagaagattttttacgaaaaaaagaagtgggacaggccatcatctctgaagtcgtttcgaaattattacatgaccgatatattaatgataaagagtatgctgttttatatacgcgaacgcaaagtaatgtgaatcgaaaaggtccaactgttattaaaagagagttattaaataaaggtgttcaggatttaattattacacatagtttacaagaatatccgaaggaaaagcaaattgagaatgccttgtttctcatagagaagaagaaaaaatcttatcaaaaacattcttttttacaaatgaaactaaagttagatgagatgcttgttcgaaaaggatattctagagaagtaattcaaatttgtttggaagaattgaaagacgaaaaagatgacgaaaagcaacaagaagcgttacactatcatgggaataaatattatgagaaatataagaagcatgatggatggacatttgaaaacaagatgaaacaagcgttatatcgaaaaggattctctattgatgaaatcgagatatttttgcaaatgaaacgcgaagaggaatgaggagaataagatgaatatgccaaaacgctacagtgaaatgacaccgcatgagctaagggaagaaattggcgctttgaaggagcaagcagtaaaagctgagcagcttgggattgtcaatgaatttgatgtattaatgagaaaaatggcaatggctcgtgcttatatgacggatataaacaaattccgtattggtgaaacatatgaattagtagaagaacctggtgtattatttaaaattacgtatttcaatggggtatttgcttggggatataagcaaaatgataatgaagagattggcataccaatttccttattgcaagaaaaataaaaaccagagagcatatatctctctggttttcatctttggtaggcgttaaaggagataggagattctaaaattggcgttttttacattcatttgccaatataatgagagactgggtttgttgcgtctgtccgttaacttgcgctttcgcatgttttggacgagtccacgtatggttaaataattcagaacgactatctaagcgatcacggtagctcatctttatcacctcgtgtaggaagttaatttaatttgtattactcttcctgctgatttgcagcacgcatacgttcttgtgggtgcgtgttaattgtgccgttaggtcgtttcgaagcgaagcgtgatttcgctttcggttgaccgtcgattttgctgttgttttttgactcagaccaaaattcggcttgtttacccattacgaacgccctcctcattatcggttgatacctctttaagaagtatcaattatagaatgtgcaaaattgaagaaactatcctttagaaatgaagggataaataggtaaaaggagattataatatgaatgatatttatgaaacattaacgaaagaattattagacaagaatgacaagctttcttacgcacaagctcgtgcgtgggttgagttactatgggaagattttcaaacaacttatgcaaaatcaggtcgttatcaaggcgatgaaatgacagaacaagtggtacgatcatggattaataatcatggtgtacgccttcatgaaatgcgtacaaataatccgaagtatagtcatttaattaatcaagaagatcatttgaaacattaaaaaaagcgacttaagtcgctttttttaatgtggaagtaattccagtttttttcgaagcttttcttcactaaagatccatcctgtataggaactaataatatttaaattgtggtcgagctgaacgattgcaacaaatggataataatctttacttcgatatcgtaaatcaatgaatcgtacttcataataatggtcatgatcaaaaatatcccagcgatatacaggagagaaagatagaaaggccgagatgttttcatcttgtttagctgctcgcataatattattgtctgggaacggtacccgatcgaacttatcatatatcatgatgttaccacggtgccatctcgcaacgtagtaataatcagccgtaacgattgctaaatggtaatggtaaaatcggtaagaaggagaaatgataatcttttcgacatttttgaaacgtttgtgtacaacgcttcttatatttctgtgcatcataatccgtccgatatagtaaacaatcattaatatatatgccgctaaagctgtatatcccttatgagaaccgacgagcatgcaagcaattgcaagtatatggataaagaaaattacggtatcgaatgtattaatcacgccgagtgcgacccatttttttgtgaaaggccgtaatgcttgtgtaccataggcattgaaaatatctacaaagacgtgaaggaagacagcaataaatgaccaaagcagtagatgaagatatggagcgtctgaaaagaaggcgaaagagatgccacttataaggaatgaccaaagaattaccgcaggaatagaatgagtaattccacgatgatttcttatatatttagcgttattacgcaattttaaaactgtgtcaatgtcaggaatgttggaaccagcaattgtagcaagcataacagcttgggggccaatatcactttgtgctatggctggatctaatgttgctaagctacctaaagtgatacccataacaaggtgagtggctgtgtccatagaaatccacctccgttttttattaatgtaactctttttattcgatacctcaagtcctttgccttctatttcctgtatcatcttacttaaattttttcctaaaatctttataatagtacttatatgcaaaaaaatgagggggatcaagtttgacacttgaaatactaaacaattttaatatagagcagtttcaaaatgatttaattggttggtttgaagaagaacagcgcgacttaccatggagaaagaataaagatccataccgcgtttgggtttctgaaattatgttacagcaaacaagagtagaagctgtaaaaccatattacgcaaattttatggggaagtttcctacacttgaagcgttagcgaacgcagatgatgaagaagtattaaaagcatgggaaggtttaggatattattctagagcacgtaatttacatgcggcagtaaaagaggtaaaagaagtatacggcggagttgtaccaagtgatgtaaagaaaattgaaaagttaaaaggagtgggaccatatacaaaaggtgctattttaagtatcgcatatggtataccagagccggcagttgatggaaatgttatgcgtgtattatctcgtattttatcagtatgggatgatattgcaaaaccaaagactcgaaaagtttttgaagagattgtgcgtgaaattatttcagtagaaaacccatcttattttaatcagggattgatggaattaggtgcactaatttgtattccgaaaaatccagcatgcttactttgtcctgtacgtgaacattgcagaggatatgctgaaggtgttcaaaaagaattaccagtaaaaagtaaagcgaaagctcctaaaatggtacctattgttgcaggtgtacttcaaactgaagacggtcgttatgttattaataaacgtccaagtacaggtttgttagctaacatgtgggagtttccgaatgtggaacttggagaaggtattcgaaatcagaaggaacagcttatagattatatgaaagaaaaatttgagctcgaggtttctattgatgaatacgcaatgaatgtacaacatacgtttacacatcgtacttgggatatatttgtattttacggaaaaataaccggtaatattgttgatacagatacattaaaatttgtatcaaaagaggtatttgagcaattacctttctcaaaatcacaccgtactatttatgaaaattgtgtggagaaaattacaatgcaataaacaaaaaaagtgttcccaatctagggaacacttttttaatcgtaagaaatttttgtcccatgagtccaactagcttcaccttcttgtaagccgcctcttgattcgatttctactacaatttctttgtaaatactttgcccttctacatttaaataaggcagaacctgttgtagtgagtgatgaaaataagctaattcatcttctttccattcattttttgaaatcatcgttagttcagtcatatcgcgtcctatatacatatttacacctccattttctatagtttgaatgagtaacaaaagttatatgcggaaattttaaaaaagaaaattacggatagcttctaagtgaattggttacattattgattgtggaggtgagaaagatgagtaaaaaacaacaaggttataacaaagcaacttctggtgctagcattcaaagtacaaatgctagttatggtacagagttttcaactgaaacagatgtacaagctgtaaaacaagcaaacgcacaatcagaagcaaagaaagcacaagcttctggtgcacaaagtgcaaacgctagttatggtacagaatttgcaactgaaacagacgtgcattctgtgaaaaaacaaaatgctaagtcagctgcaaaacaatcacaatcttctagctcaaatcagtaatgaaagaaaaacacttctctaattcgggagaagtgttttctttttgcgtggatcgttgtaatgaaaaggaagcgaacgacataacttctaataagtcaacaaatgtagtcaaaggagaaggaagttaaaaattagaattatgtaattaggaataataactgatgaataagtccaaaagggggtaagtaatgaacgattttgataagttggtaggggagcaattagaaacgatggatgagttgttaaagttacaagcacatctagagaagtatcaacaaatcgaaatgaatgaaaaagatacgtgcgataaaaaagaactgcattttatccgtcaggaaatatatagaacagaagtagcgttgaagatgttacatgagaaatttgaagaacaaacgaatagtgtaattcaatcttttacaactgaaaaaatgatttcaaatttaggataagatatattgttatcttcaggtgaaaagtccttctttgtatggaaatagagaagggctttttctattacatgtcctcgcttataaataatgcagtacaatccctatctcttaagaagagttggggcatagtattcaacgataaacctcctgcatattcagtttgaaaaatagagtcttatccctttagttttaaaatttcgacaaaaaagttataatagaaaaaaagtgaatgccgttcaaagggcatttgcagttgaaagaagggagcatatatgggatttcccaaagaaggagaaaaagtacaaatacatagttataaacataatggctccattcatagaatgtgggaagaaacaacaattttaaaagggacacagagtcttgtaatcggagcgaatgatcgtacagtagttacagaatcggatggccgaacatggattactcgtgaaccagcaatttgttattttcatgccaactattggtttaatgtgattgggatgcttagggaagatggcgtatattattattgtaatttaagctcaccttttgcgtatgatcctgaagcattaaagtatattgattatgatttagatattaaagtatatccagatatgacatatacgcttctagatgaagatgagtatgaaaaacatagtcaaattatgcagtatccacctgttattgatacaattttaaaacgaaatgtagcacatttaacacagtggattcatcaaagaaaaggtccatttgcaccagacttcgtagatatgtggtatgaacgatatttaatgtacagaaattaaaacaaacctgcagggggcttcccggcaggtttgtcctattagaggggggattatgtgcaaggcataaaaagatatttacaatttgttaaaccatatcgatggcttattgctattacaattattattggactagttaagttcggtatcccacttattatgccgtggttattaaagtatattatcgatgatgtaattcaaggcgcgggctcacttcaagataaaacatctcaattaataacagcgattggaattgctttttttatttttgcggtattaagaccaccgattgaatattatcgtcaatatttcgcccaacatatcgcaaatacaatactgtatgatttgcggaagcatattttcggtcacttacaaaagttaagtttacgttattactccaatacaaaaacaggggagattatttcgcgtgtcatccatgatgtagaacaaacgaaggattttgtaattactggtttgatgaacgtctggttagatactgcaacaattgctattgctatcattgttatgttttctatgaatataaaattaacatttgttgcgttattgattttacctatttatgtaattgcagtgaaatattttttcggacgtcttcggaaattgacgaaagagcgttcacaagcgttagcgacgatgcaagggtatttgcatgaacgtattcaaggaatgcaagtgacacgtagctttgcgttagaagagtatgaggggaagcagtttgaaaaaagaaataatgaatttttaacgaaagcattaacccatacaagttggacggcaagaacattttcggcagtaaatacgttaaccgatttaggtccgttacttgtgattggttttgcagcatatgaagtaattcaagggcagttaacgctaggaacgatggtagcttttgttggatatatggatagtttatatagtccgcttcgccgccttgttaattcatctacaacattaacacaatcttttgcatcgatggaccgtgtgtttgaactgttagatgaaaaatacgatattgttaatgtaccaaatgcggtacaaacgaaaaaattaaatggagaaattgtatttgacaatgtttcttttcgttataatgcagatgaaaaagagatattacacaacttgtcattaactatgcagcctggagagaaagtagcgcttgtaggagcgagtgggggaggaaagtcatctcttgctagtttgatcccgcgtttctatgatgtttctgaaggcgcggtttatgtagatggcatagatgtaagaaagtacaatatgagaaatttgcgtagtcatattggaattgtactgcaggataatttattgtttagcgatacaattggagctaatattttatatggaaatccgaaagctacagagaaagaagtgattgcagctgccaaagctgcgcaaattcatgattttattatagacttaccagatggttataatactgtcgttggagaacgtggtgtgaagctatcaggcgggcaaagacaacgcgtggcaattgcacgagtgtttctaaagaatccgtcggtacttatattagatgaagcaacttcagcattagatttagaaaatgaaaggtatattcaagaggcgcttcagacgttagctgctgaccggacaacgattataatcgcacatcgattagcgacgattacgcatgttgatacgattatttacattgaagacggtgagattaaagagactggttctcatgaagagttaatgcgaaaaagaggattttattacaatttatatcaacttcaacatataacagaaacagctcctttaccataaaaggagctgtttttttattcgtcttcttttttatcatcgatttggagttctttttctggtttatgatatgtgtagaagctatctacaagcaaatctaaatgctctacttcttcgctatagttaatgatggaagaaataagagggaagagatgtaaccatgttttatatgcttcttcatcgtccttattttgatattccataaagatatcaattaattcttgtttacctgtttcaacttcatcaagcatttcaactgattgttgtttttttgctttaccaataaattttaataaaacttgttcatgataatgcgttaatgagtcaagttcattttggatagattcctgaaattcttccggcatatagcgcagttcattttcagtacggtgtaatgattttaacgtacttaaagcacggcttgttgtcgctaacatttgtctgaataaaacgagcttacgaatttttgcgaactttacttttttcgtatagcttctttcttctttatacagcaaatagtaatgatttagtttaatcattttttctttcatacgatcaatatcagtttttagcgttgtaaaatcagaagcctgcctgctattcattcgaatccattttacaatttcttctgtattatcaacgatacgatgataaagttttgtttcatattttggcggcataaatactaaatttacaagtgaagccgcaataataccaatcataatcgtcgcaaatcgaagtaaggcaaaactaaagaaatcttcgccttgatactccataatggcgataactgttactaaagcaattgatattgtgttttctaatcgtaattgtaatgtaagagcaattactaatatacatgttaatccaataataaaaggattatgtccaaaagcagtagcaaatgcgatagcaaatatcgcaccaattacatttgcttgaatttgttcaagtgctgttaaataagaacggtatacagacggttgaacagcaaagatagctgaaattcccgcaaataccggactcggtaattgaagtaaaatacaagcaaataaagctaacgtgatggcaatacccgtttttaaaatgcgagcaccaagtttcatacccttaataagatcctttctcttgtcataatgaatgtacaacatgatactatacattcattacaatatgttagcaagtgatattttagtgacgttaaaagaaattagtgttcattttatcccgctaattgtgagtagtaagattcctgcctcaaaaattagaagctagatgccggtaaacgctcgattggtgtaggctaattaaagtttcactttataatttttcctaattccttttaaacatcagtttttagtaaaaaaacctgctgaatttcagcaggtctcaaattgttactatagattactatgagaagcgtacttcgtcaattttttcttaataatgaaaattactcattttactctgttgagatagatgggtctgcctgttcttttttcgggataatctcaaaaaactggttctgtatatcatctaataatgctgttaataaagcaacttcctcatattgctcatgttcgtttagtacacgaatatagtctagcaataattcagttacatctttcaaaccatttttactaattggttgtaatgtaacatttgcgccttttgcaattcttctttttaaggcctgttctgttaggcctaagtttgaatcatgacgcaaataaacaacaccgccagtcatgccagcgcaaatccatggaccagggtcacctaaaacaagcgctcgcccatttgtcatatattcaaaagcaaaacctttaatattggagtatgaccctatatttccttgctctttttcacggagtggttttgttattctacctccaattatcatgtctgccccagaaaggcgaatgccagcgcgagcatcagcgttcccttgcacgtatagtgcccctttttgtgcaccatatccaaatccttttccgacagaaccgttataatatactccgtcttttccttttgatttcgttatataaatcccaccaccaaaggaagttttaccaatgccatcttgtgcgccgccatttacgtgtataaataaattttcactattgtaagcgcctaacccatttccgggaatagaaccattcgtatactttaatgtaagtggttcaagttgagtagcttcatatagtttactgcgaacgcgataacatgattctagaccacccataacgcgttgctctacaccaacgcctactaattcttttgagtcagcggaatgaactgtcttaaattgtttttctggtacaccatctgttgttgtaacagatggatgttctattatttgtaataaattacgtaagtttaataaattttcgcctcgaacttgctctaataaatcagaacgcccaacaattgcttgtgaatttgtatacccaagctgtcctgttaatcgttttagttctataccgaaagaggtgaataaatttagcaggccagtaactgcgctttctaattcgcgtgggacgaagcggcgtaacccatgttcctttgcttgtgcttcagactcgatttgtgttgcaattccgacatggcaagtatctagatgacacccacggcaagtagtgcagccgattgcaatcattgatagtgtgccaaatccaatacggtttgctccgagaagcatgattttcaaggcatcatttacacttcgaataccaccatctgcccaaatctctactttatgtctcatgctcgcttctaataaagcgttgtgagcggctttaacaccaatttctacaggaagacctacatgttgcaaggcgtgaatacgtgcagcacctgttccgccatcgaatccgctaatgttaataaaatcagcaccagctttggcgataccgacagcaattgttccgatattaggaacgacagggactttcacggctactttggcaagttgattagctgttttaatttccgtaatcatttgagctaaatcttcaattgaataaatatcatggttattagaaggtgaaattaaatctgagccaattgtcgcattacgtgcttcagcgattttggctgttacttttgaaccaggtaaatgcccaccttccccaggctttgcgccttgaccgattttgatttcaattaagttcgatgagtttagtagttcggcatttactccaaatcgcccagatgccacttgttgtccacgtgtatgtggatattttccaatcatatctttaatttcgccgccttcaccgttcaagctaatcatatttagctgatcggccgcttctgcatatgcgcgaaaggcaatttcgttttgagaaccaaatgacatagaactaataataaatggaaaatcatgatttttaatgccgatagatacttcttcagttggaacgacatgttttgtttgtttcgtttgaacaaggtgtctgattgcgatgggattattctcttctagttcacttaacttgtcacggtaatcatcataagaatttccttttgcaacatcgccgattgctttccaaattcgcgggaatatatgaaatgattttcgcattctaattttaggattgttataatcatccgctcgcatttttgcatcttcagcaagtgattcaagtgaaaaagctaaatcatttgaaccgaagaaatttgtaatctgtaatatatttgcgatttcttcatgtaacccaatagatgaatagagacgtccgtaaccacgtaactcatgaattccaattgttgaaatgactttttctaatcctttattaagtgcattatacagattcgtaattggtgtttttgttccatcatttacagtcgcgaataataaatatggattaatactatctgctcctaatccatatagcgtgacaatgtcatgtaaggagcgaagggcaccagaacgtataacgagagaacaattgcggcgtaatttattttcacttaatgcttgatgtactttagcagtaactaaatgtggatcaatccacaatctttcatttagatgggcttttacgtcatctaatactagtagggaagcaccattgttaacagcagctatcgcttcagaactaatgcggcttaatgcacattgtagagtttctgacgagctgaatgtagcagagattgtggcgatagagttatgagttttaaatagctctatgagttgttcgtacgtaattgtgtgtaattcctctgcaataggttgtgccacgctgccttctaaaataattggtgaaagcatttcaactagaaatggccgttttgcgccgcttaataaacttggacgctctccaagtacagtacgtgtagagaagtgttcaatttcacggtcacggtcaattgcagggtttgtaacaacagctacactttctttaatgaagtcagcgatatttcgtctatcagtatcaagtgcggcaagtggtgagtcatgcccaagtgagcgtattggctcaacgccttttgttgccatctgttcaaggagttgaatatgttctcggtcccatccgaaagcgacgtattgtttcgtttcaacttgaacagaatcacatagcccttggatttttttcgtttcagggatagataaatttaaatggtaattggtagtatcaattcgctttttaaaacggttatatacttggatttgatatttgtcatattcataaagaacaagttcatcttgttcattccattttaatccgactttttctccaggagcgagtggttttggttctgctacatatttagttggtgatacaactccaggttcagaagagaaaatataagagctctctgtctctactttccatactgggcgtaatccaagggaatcaacgctgaaaacagcttcatctttaaaacgggaaatgatgccagctggtccttgggcaaaatgtccccacgcttcacgtatatacgtatataaatcttgtaaaggtgtttcataaagtttaatttcattaataattggtgggaatagaatttccattgcttcaaataagctgtagttgtattgaacaagtagggtttctaaggtgcggtttaaatcttgagagtcactgcctcctgcagtaagtggtacatcaatcatttcagcttgatcgcgtaatttcgcaattgtgttaatttcaccattatgtccgagaatgctaaatggttgtacacgaaaaaaattagataatgtattagtagagtagcggttatgtcctaatgtcatagttgaagcgataagcggatgttgtaaatcattatagtaggcaacaagcgtatcaccagcacctagaactttatatacaacatgattacgacttaatgaagcaacatgaattgcttcgttttcctctatttttattgtgacagaaaataatgtttgctcaatatttgtaatttcgttttctgcgataagggcaacttgccaaaataaaggttcttcttgtttaccaagtggaccgagtgcatctgagtttgttacatcatcactttcgaaaatgatagtaaagtttttgttgtttaattgcgtacgaatataatcttttaaggcagtaatgtcttcttttttatttagaaaaaaatgtccaacgataaagtggggatgatccacaatcgttggattatatccgctactttttagtttttcattccaaagcgtttttggtatatcaatgtgaatgccgatgccatcgccctcaccattaatgaaaccagctctatgattcattttgacgagtgattgtatgcaaaggtcaatgttttcttttgtagcaatttttcgtttctccataacggaaacgattccacacgcatcatgttctgcatttctataatctcgaaataaagacggtgtccatgtattttttttattgagcatccgtcaatcccccctcttgtaaaagttagaataatcttactatttaaggtgcgaatcaccttgtacacagagatagtaatgctgtaaaagagtataaaacagataattatgaataattatactattaatacggaatttatgaaatagaaaaaaggaaaaaagaaaggtgagctttcttttttccttttaatgacgggattatttattgtctgctagggcagcaaatgctctgccgacagcttcgattgtatattcaatatcttcttttgtatgttctgtagttaagaaccatgcctcgtatttagaaggtgctaagttaattccttcttgaagcataagcttgaagaatttaccgaacatttcaccgtctgtatcttgtgcggcatcgtaatcttcaattgtatttgttgtgaagtatacagttaaagccccttttagacggtttaatgtaatgtcgatattatgtttcgctgcttgttctaaaattcctttttcaagcattgcaccaagttcatctaatttctcataaagcccttcttgttgaagcacttctagacaagcgatacctgatgccatagaagcagggtttcctgccattgtaccagcttggtatgcaggtccaagcggagcaacttgttccataatttctttcttaccaccgtaagcaccgattggtaagccgccgccaataactttaccaagcgctgttaagtcaggtgtcacaccaagtaagtcttgagcaccaccgtacataaagcggaaagcagtaataacttcatcataaattactaatgcgccagcttcgtgaacaagttcattcactttttcaaggaatcctggtttaggctctacaataccgaagtttccaacgatcggttctacaaggatagctgctacttcatgaccccatttatctaaagcctcttttaaagtttctacattattaaatggaacagtaataacttcttgtgcaatactttgtggtacgccagctgagtcaggagttcctaaagtagaaggaccagatccagctgccacaagtactaaatcagaatgaccgtggtaacaaccagcgaatttcatgatttttgtgcgacctgtataagcacgagcaacacgaatcgttgtcatcactgcttctgtaccagagtttacgaaacggactttatctaatgcaggcattgcttcttttaacatttttgcgaattttacctctagcgctgttggtgttccataaagtaccccattttcagcagctgttgtaattgcttttgttatatgcggatgagcatgtccagtaataataggaccgtatgctgctaaataatcgatatatttatttccgtctacatcccagaaataagcgcctttcccacgttccatagcaacaggagcgccgccgccaactgctttaaaagaacgagaaggactattaacaccgccaacgatatgctctaaagcttctttatgtaatgcttctgactttgtgaatttcactacaattcatctccttacaaaaatctatgtattattctaacatgtttttcgaaaagacgtattgtttgtgatagcgaaggcagttgggtaaactattcgttgtgacatttaggaggggggtccgattatgaaatcggtaattgaggtacaagggttacgtaaagagtttacagcctattcaagtcgtccgggcttaaagggtgcatttcgcgatttattaaatcgtaattataaaatagtaccagcagtaaatgatgtatcttttactgtaaagcaaggtgaaatggttggttatatcggtgagaacggtgctggtaaatcaacaacaattaaaatgcttacggggattttaactccgacatcagggcaaatcacagtaaatggaatgaacccacataaacaaagagaagaatttgtaagaacaattggtgttgtttttggacagcgttcgcaactttggtgggatattgcagtacaagaatcgtttcgtttattaaagaaagtgtacggtgtatcagacgctcagtataaggagcatatggagcacgtaattgaaacgttagatatagggcctttattagataaaccagttcgaaaattatctcttggtcaaagaatgcgttgtgaattagcggcagccttaattcataatccaccgttattatttttagatgagccaacaattgggttagatgtacttgtgaaattgaaaatacgtgaatttttaaaagaaatgaatgaacgttataaaacaacaattttattaacaacacacgatattactgatattgaagctttatgtgagcgcgttatcatgctggatgaagggaatattatgtatgacggttctttaagtaatcttcgtacgcagtggggagcagagaaggaaattcactttcagtttgttgcaccagtttcctatcaggctttatcaatggttatgccagataatcatgtcgtttggtcgaaagcgaaagaggaaaatgcatgggttgcaaaaattccgaatgaagaagttattatttcaatgcttatttctaaagtagtacaagcatttcaaattaaagatttaaaaattaacgaagtgtctacagaggaaattattcgtaacatttatgaagaaggtattacgcatgggtaagtatattgaaatgattcgaattcgctttttaatgatgcttgcgtatcgtacaaattactatagcgggattttaatttatacgattaatatcggtgcttactattttttatggcaagcaatttatagcggaaaagagaatattgaaagtttatctatttcgcaaatgaccacgtatatcgcaatcgcgtggatggcacgtgccttctattttaataatatagatagggaaattgcgatggagattcaagaaggacgtgtggctgtagaattaattcgtccgtataactatttgggaatgaaagttatgcaaggtcttggcgagggaatattccgttttgccttcttttccattccaggcatggttatcgttacgttattattttcgttgcaaattacaacgaattttcaaacttggttatatttcttcttatctttaatatttagctttattattaatacacaaattaatttaatgacgggaatgcttacgtttttcctatttaataatagtggaattatgtatgcaaaacgcgttgttattgatttattttcaggtctattattaccaattagtttttatccgttatgggcccaaaaagcaatgatgtttttaccgtttcaggctattagttatattccaagtatgattttttctgaaggtatacaggggagtaagttgtatgaggctttagtatttcaagtgatttgggcgattgtacttattattccaattgtactcatgtggagaacggcgagaaaacgtctaattgtacaagggggatgatgagatgctatatataaacttatttttacaatatgcaagtcaatatataaaaacgaaattggagtatcgaggcgattttatcgttggtttactttctgatttatcgcttcaagcagttaatttaatatttattctcgttgtatttgggcatacacaagcattgaagggatggagtcgagaagaggtaatctttatttatggtttctttttagtaccatttgccatcttttcagctttctttaatatatgggattttaatgatcgatacattattaaaggggagatggatcgtgtattaacgcgaccgatccatagcctatttcaaattatattagaaagaatggaacttgaatctttaattggagctattacagggattgttgtaatgggatatgcagctgtggagttacaattatctttttactggtatgatttcttcttatttatattgatggtaggaggaggagcacttgtatatggagggatatttgttacgttggcgagccttggtttttggtcggatgcgaaaagttcaattatgcctcttatgtataacataggtaattacgggcgctatcctgttaatatttataatcgtgtaattcgtttcattttaacgttcgttttaccgtttgcgtttgttggagtatatccagcagcatactttttaagaaaaacagaatggaatagttatgcatttgcgacgccaattgttggtattatctgttttacgattgcaatcaccctctggaaccaaggggtaaaaaggtatcgaggcgcgggtaattaattatagaagcttgttcgtttctaagggataaatcagttctccacctcatacatataaaatgaggtggaggacatgttatggggatttattctattaattgcagcaatcgctattttgaaaagtgtccaattattatggagttcctattcggattcaacgcgttttttttcgctctataatttggccacattatttttaatctatacaacagtactaatcgcatttggattaagttacgttgtattagaggaaatgggtttcgcagttttgaaagaggacggagaaagtttgaacgctcattcttttcaactcgtcgaagtttgtttatattttagcgcagttactttattgtctgttggatatggtgacatatctccgattggaattgggcgatggattgcaatcgcagaagcgctaattggatatacactcccttttgcttttgtgatgaggtctgtaatagacaatgaaaaataaggaagcatttgttatagtaaaggaaaagagtaggagtgataactatgattacagtaggagaaatggcaccagaattcacattagagggaagtaatggagaagaagttcgcctagctgatttccgcggtaaaaatgtagttctctatttttatcccaaagatatgacgccaggatgtacaactgaagcatgtgattttcgtgatgcgtatggagtatttcaagagaaggatacggttattcttggagtaagtcctgattcagcgaatagacatttgaaattcattgagaaacatgaattgccatttacacttttagtagatgaagatcataaagtagcagagttatacgatgtttggaagttaaaaaagaactttgggaaagagtatatgggaatcgagcgttctacattccttattaataaagacggtgaacttgtaaaagagtggcgtaaagtgaaagtgaaaggacatattgaggatgttctttcttatataaaataaatctacattggggataaaatatgcagaaacaaggcaaatgtctatacatattttactgccttacataaagtggaagtgtagggcatacctcctcagatgatagtattccaagtgcgattatgtcgcacttttttctatggaatatatgaagaaaaaagggaaagatacataaaaacaagtcctgaatataaaaataaactacatacttatagtagaaatattgacgatttataagaaaaggagtacactctttataagaattataaaataataatccgtatagaatcggggtgcatgacggtggtcaaagaagaattaaaagaagcgctagaaatgctgaaaaatacgggtgtacgcattactccacagcgtcatgctattttagagtaccttgtggaatcaatgacgcacccaacagcggatgatatttataaagcattagaaggtaagtttccaaatatgagtgttgcaactgtctataataacttacgtgtgtttaaagaggttggacttgtaaaggaattaacttatggagacgcttcaagtagatttgattatgttacaagtcaacattatcatgtgatttgcgaaaaatgtggtaagattgttgattttccttatggaggcttggaaaagctggaagaggaagctgcgaaaacgacaggcttcgttatcaatagtcatcgcttagaaatttatggcgtttgtccagagtgtcataaggcgtaatatataataaagaaagaggctgacggctatacgtcagcctctttctttattatataaggattagcgtgaggttaatcgggatttacagtgctaagttagtaaggagggttagataaaagtttgtcgaatttactttgtattggtggaaatgaattctgggaggggacattttgaagaaatatgagattaaaaataacattccaacattggaagaatataaatatttatgtgattctgtgggatggactaactatatgaactttgaggtggcggaaatatcacttcaaaattcgatttactgtataacagtcaaggataataatcaaatcatcggcatggggagaattgttggtgatggggctatctatttctatattcaagatatagtggttcatccagagtatcaaaagaatggtattggaaagaaaataatgaatactttagtagaatacttaaatcagaatgctccagataaagcattcattggtttgtttgcgtcgcaaggtaaaacatcattctacgaaaaatatgattttaaagattattcgcctaatatgacagggatgtttactgttatttcgaaaaaataggtgtaataaatttaataaaacaattaaaaagttgattttttaagaaatcaactttttaatgagttgaaacgtttgtagtgttgcaaattcgtatttcccttgatacttatgatttataactcttcttattatacttttcatcaaattcttttccttctagatctcgatctagtgttaaaggttgattgcagtgcatacatgcatcgacacggccgagcattttggttggcttatcacagcttgggcaaataatttggatagtcttagtagataacataccaatccaaaagtaaacgacagtgctagcgataacagctaaaaagccaaccatcataaacgttgtcataataataatgttttcgcggaaaaagacacctaagtatgcaatgaagaggccgataaatactaaacttaatgcaaaggtccggattttattgattttgtttgaatacttaatgctcattctcaccacgctcctatactaataatataacataaaatttagaattttcactctcgtgtaaattgataaagggataagatatgaaatgaataggaggggggccatgaagaatgaatggacgctataaggatttttacagcggtttttcagtttttaacgggatgtgaaatttttttataaaaagtattgaccctgtatatactgcatgatatattaataaccgtcgctgatgcggaaacgcagaaaacgacaaaaaagaaattaaaaaacttagttgacattgaaaaatgaagatgttaacataaggaagtcgcgaatgagcgactaagtagttctttgaaaactgaacgaaacaaacaacgtgaaacgtcaatttttattttagatgctagacaaactaaccctccagataaaacagtattgagtccatcatatcagatggactctttttttactgtctacctataggggataataccatgttccctctttttttataaagtaaaactttaattagtggaggagggcatcatccactaattattagctcacaccaatcgggataaaagtaaggggaatgagagatggatatatacttattaatcgtcacgttacttgcgatcacaattgttattttaggggtatcatggtggaaatggcatgcatttattagtttaacagttgcgagtttatttttagctattatgtctggactgaatgtaacgaaaatagtggctgcctatgaaactggtgttggtagtgtactagggcatttagttggtattttagcacttggaacaattttaggaaaaatgatgtccgattcaggggcaggcatgcaagttgcagatttctttattcgatttttcggtgtaaaaaaattaccttgggctatgttatttgcagggtttgttatagggattcccgtattttttgaagtggggattgtcattttattaccactcgttatttcaattcgaaaaacgacgaagcaaaatatattattaattgcgttacctgtcattgcaggattatctattgttcacgggctcgtaccaccacatccaggggcgatgacagcaatcggtatttataacgcgaacttaggaaaggtacttttatattcattaattatcgcgttaccaacagccattatcgcaggcccaatatttgcaaagtgggtacataagagggttatacctgaaaatgaaccggagcttgttcgagttacgacagtatcaactgatttgccaagtcgtaaagtttcattctttattattttattaccagttgtattgatgattttatcagtagttgcaccatatatttcattaccgaaaaaattgactgaattttttgtgtttatagggagtccagtaatcgccttacttatttcatgtttcgcagcattttatttacttggtatcaaacaaggtattaataaaaagatgattaaaaaattaacagatgaaagtttattgcctgtcggttctattattttaataattggtgcaggcggtggatttaaacaaatattaattgaaagcggcgttggaacagctattgcacaaatggcagaacatatttcgttatcaccaattgtattagctttcatggtagctggtttaattcgaattgcaacaggttcagctacagtagcattaacgacagcagcagggattgtttcaccagttattcagcacatgtctggtgtgaatttagagttgctagttattgcaaccggtgcaggatcattaatgttttctcacgtaaatgatgcagggttctggcttgtaaaagagtatttaggtttgacggtgaaggaaacatttaaaacgtggacggtactcgagacattgttatcatttattgcatttggttttgctcttttgttgaatatgtttctttagggagaaaagcccattttaattaataaaacccacaggagaaattcaatttctctgtgggttttgctattttttaatcgtagttacttacaaatatacagggcaaggtgctttttatatcttttttctattgtcctattatttaatagaacggacatactgattttctccatcgtctttgacaaagactcctagctcattcaaatctttgcgtaaatgcttcttttttttcgagtttccttctcgaagggcatttcgtctttcatacaaaatagtatttatgcttttattaaatcgcgcatcctctaatttccataagctatactcatgtttataaggatcttgttccacccaggggaagtcgtgcattaagaaagtatctttaattttgcttggggtaatgtcagatgtttcacgtaaccattctcggtcttcttgatcaatgataaccacttgacgcttatctacaaaaacggcttttacatttgatctggtgatttgtttcttttgatcgtccttattcacgtgaatgctttccgaagtaatgttcatttttaaagcttcactataaataattaaagaaaataaaattcctgcaataacaccaattagcatgaggataataggaagccagaagggattaataaaatttaaaagttctataatttttgaatcagaaaagagaggaatcttttttataatctctattaatttaggtgaaaaatatccaataacgcctaaaaggattggacttactatagcaagtaacttttctaaaaaacctaatccaatgacagatgcctttttcatgtgtagttcatcctttcttatatatattttttaaccagggcatgttttaaatagtgagttttttcaccatttttatgagctcatctgagtaattttctatggatatagatgaatttgccttcaacattctttcttcgattgctcctaaaataaatgaagctaatgtgtcggtttgaaaagagttagaaaacacgccattttgttgtccagtcttcaaaatatctaataacatcgttctaagagcatcctcttcgtcgtcttcgattctgtaataaggaatgttctcttcatttcttgcattaaagacaatctcaattaaggcaatattatttttgtaatgagtttcttgataagccaagtgtgcttcaataaaagcctctagtttatttatttcagattgagctaatagtactcgattactaataaattcatgttgtttggcaactaaaaattgtaatgtacggttcataaggtaaagcttatcattaaaatgataagaaataagtccggtactaatcttagccttttttgccaccttcgttaagctcaagttgttatatccaacctcttctaatgtatcaatacatgcaagaataatttgttcacgcctagcctctgcaataaaagaatcagtcacgctattcaactcctgatttatataatttgaatgtataatcaaaaaattgattgatcgttcaattaaatattagtaagaaattattagtatgtcaaatgttttatacctacatcttgataaggctcattttctgaaacaagcccgtttttaagaaagccaagcttcctattcgccctgaaaacatactataaatggaatcccctcatttagaacaagaggaacttgttatgaatgatactaaaggaggaatagggtaatgagcgaaaagtgtgaacacagacatgatgattgtaaccgcagacatggttgcggaggcggttttgcgcttctaatcgtattgtttattttattaattatcatcggtgctagctgcttcggcggaggcggcggttgtggttatggcggttacggcggctacggatatggtggctacggcggatattgctgctaattattaaaaactattgaaaatggccttgtgcaatacgcacaaggccattttattcatatttttatatgctgtgataatttattaatgtacagagaacggattaagaagaagaaaatgatctcgataatcccgaaaaaggtgagtacgatacatgtctcttttagtaaggagaaagaaaacatgctttgtaaaaacttaaccgcaaataatgtgtgaacaccagcaacgatgtaaggaacgaaaaataaaattcctaattgaatcgttgcagagcgaaacatttctgattcagttaagccaagctttgtaatcgtaatatacttttgtctttcagttgttaagtcattatacatacggaagtatagaacactagccgcaccgataaagaaaataaagccgagaaatgcccaaataaagaattgagcaactgcatttcctttaccgtaaatgagttcatccgtagccgtatgtatgaagaaaggaacttgagcgttctcttctgtatgcttttcgtagaactcacgcgcatcgccactaataacacgtaacatatttttggttggaacgattgcattttcccagttttctacgaagtagttatagattacagttgtttcaatatgaggaatcatattatcaaatacataatcttgtacgacagctaaatgtgggaatgcaaaggatggttcgattcccttattaataaaccctttaatatgaaattcttttttattagacccgagtgtaatcgtattttgctttgcaaatggattagatacgagatcgagaagttctggtgagtgccgagaaataatataaacttctgtagaatcgattgttatttccggtcttttcaattgtttagcaattgcgttataatcactcatcttcataagcataatatcttctttggaagctgtatcttttaatactgtaaacttatattttttgtaaagaaaattattagttgtaagctccgtttcaattgtagaaatatgcttttgttcaagggaattgtcaccttctgatgtatacgtgaagggaacgggatatcgctctaatactgatgccttcgtattgttattagcggcgaataatccaataataatcgtaaatgcaagtgcagatagcatagaaacaataaagagtacattaatattactgcgtgtacgagaaactaaatctgaaatccataacatatttatttgtttcaaataaaactttctgcgcttctttaaaatatagatgaaaagaaggaatgtttgtgaaaagaataaatatgtcccgactattacgagcggtaaaatagataacataataaaaaagacagatccattttgcacatttttttccgttacgtagcctcgcggataaccagcgatataatagcatagccctaaacaaattaaagcgaataaagagatgagtatagatggtcttttttcagctggcattttcttgttccctttaatgaggtgggctgtctttcgagtacgaataaacattggtgtaaatgtagaaacgattaaaaataaaatgataaacgttacggttgtaacgataatcgcttctgttggccaatataaatagagacctttcgcacttgttaatttcgaagtgactaataagaaaaagttagaaaatacaagtccaccttgaatgccgataaagatagataatatcccaattatcatgttttcggtaaataacaatctttttaattgtctctgtgagataccaagaatagtgagtatcccgaattgctgcttccgaacatttaaaaatgttccaattgaatataagagaaagaagaacgagaacataacgatcacaagttgtgctgtactagctaagttcattagaggatcacgttcttgaaagctttgtacactctgtaagcgcggatgatacgcgtatacagtaaatgaaaagaaaaccatgatagaaaaagcactacttacaaagtaggcgaaatatgctttcgaattacgtgagacatttttaaatgcgaattgccaaaatgtcatccacgtcttcctcctaataacgctagaacatctaatatttcttgataaaatttctcgcgatataatccgcggtgtagttcattgtaaagctctccatctttaatgaaaataacacggttacaataacttgctgcaaacggatcgtgcgtaaccattaaaatcgttgcatcttcttctttatttaatttcgtaaataactccattacgtcaattgccgcttttgaatctaagtttcctgtcggttcatcggctagtaagagagaagggtgatgaataacagcacgtgctactgcggtacgctgtgcttgtcccccagaaacttcaaaaatacgcttgtccaaaatatgatcaattccaagcttttttgaaatgttatcaagcttttcatccatttcttttaatggaacattatctaatgttaaaggtagtacgatattttcaccgattgttagtgtatctagtaggttaaagttttggaaaacaaatcctaactcttgtcttcggaaaatagctaacttctctctacgaaatgtgtgcggtttttttccgttaatcacgacatcaccagaagtcggagaatcgattgtagagataacgtttaaaaatgtagattttccgctaccagatggtcccataatggcaacgaattcccctttatccacgtgtaaatttatattttttaaagcagtatgagggactttcccctcatatacttttgagacgttttttatgtgtaatacttcttccatagtaatcacctttctactttttaaaacttaatgtgttgtgataatttttgcatataaaaggaacgaattaaaaggaaaaataaaatttcaactgttccaaaaatcaacagtacgactgtaatttcagcgaagaacgagagatgtaatatttcttgtagcatctttgtcgcaaacatcgtatggattgatgccataatgtaaggtacgaagaaaagaatcgcaagctgaattgtcgctgaacgtttcatttcagtctcagttaagccgattttcgtaatcgttatatatttttcttgctcatttgttaaatctgtatacatccggaagtaaagaacactgccagcaccgataaagaaaataactcctaggaaagtaccaattaagaagaacgaagcgacatttagttttgtcttatatagagaatcgctcgcttcacttgcatggaaaggtggatgctctgcttgaattgctgcattatcgttatggatttttgttataaacgatgaaccgatattatgtgctttttcccaatctgtaactttaaagctatatacactcatttgttttgaaacgttggataatgcttctacattttcatcagatagtatgagcaattggtatattaagcgatttgggaatgggttataacttttatattctttcacttgtagttgtaaattgttttgagtaagtgtaagagtatttttgttgtctttattatgaagcgttccaataacttgatcatctaagtctttcataagaatataagattcattcttattgaccgtgagcgtttcccaatttaaagccttagcaagtacattatagtcactttgtttaatggcataatagagctgcgtgttatcttcagccgaagatacttcatatatatccgttttaaattttgtataagtaaagtgctcttcattaaatttctgctctaaccagtttaaatgttcatcagctaacgtattttcagtatgtgataaataagtaaacgggaaagggttttgtctaatttcatcaaactttgtaaacttcccgaatccatataagaatgtaatcattgtaaaagcgagcgtcgatagcatcgctacaataaagagcatgttaatgtttgtccgaatacgtgatgctagatctgaaatccaaagcatattaattcgtttcatataaaactttcttcgtgtttttaaaatacgaataagtaaaaaactaatttgtgaaaagaaaaagtatgttccagctgcaataagcgatgggatgacaaatatactagagacggcatataaaagcccaattatgtcacctagcgacataaaatacagcggatttgcggctaacgcatatccacatattaaacaggtcgcaccaaatagagagatgagcacggatgcttttctttctttttgttgttttccttcttttaaaagacgtacggcttttctcgtgcgaatgagcatcggtgtaaaagatgatacgagaatgaagaggccgagaaagatgatgatagttaaaacgatagcacttgtaggcggatataaatataaaccaggtacgtgtgtaattttggcggtaactaacaaaaagaactgtgaaaagacaagtccaagttgaatgccaaaaaatatagaaagagcaccaattaacatattttctataaatatgagtcgctttaattgtttttgagatatgccaagcactgttaaaatcccgaactgtttttttcgtacttttaaaaacgtcccgattgaatacagtaaaaagaaaaatgaaaagaacacaatgacaacttctgaaattgtcattaatatgttcagagaaaaattcacgtctgtcatatgcaatttaggatgaaataaataaactgcaaatgagaaaaagattgcgatggagaacgcactgcttacaaaataggcgaaataagctctggcgtttcttgtgacgtttttaaatgcaaactgccaaaatgtcattcacctaaacctcctaatagggtgaagatgaaaagagtatgagagatactcttttcatcaagtttgttttaaatattttgtccactcgtgtaatgtgataatttttgcatataaagtgaacgaatgaataagaaaaatacgatttcaacgaatccaaaaataataagaacggctgaaacttctttgaacagagataaaccaattacatcttgtagcatttttgttgcgaacattgtatgaatggatgccataatgtacggaatgaaaaataaaatactaagttgaatggttgcagatcgtttcatctctgtatctgttacaccgattttagaaatcgttatatatttctcttgttcgttcgtcaaatccgtatacattctaaagtaaagaacgctaccagctccaatgaagaaaataactcctaaaaatgtcccgattaggaagtacgcggcactacctgatgttattttgtataacgatcctgctgattcaaaggaacgaataagaggcccttcatactggtatttatttcgatctttttgtaccttttctataaaattatcagcaatttcatatgtctgttcccagttttgaattttgtaattgtatgctgatatatgttttacggtgttaggtaagttatttacgataacatcaggcaacactatcgtttgatatgaaaagtcagatgggattgcgtttacatgctcatagcctttaactcttaatttcgtatttgtactagagagtgtaatgtaatctctattgtagctttgctcaaattcgttgaatatggtgatataagatgtccctgttaacacatatgcttcgttatcatccataaatagttgtttcattcgtaaagaattcgcaagtttgttatagtcactttgcttaattgcgtatacgtcattataaatagctatatctttatcttcttttagtggtgtttcatatatatcagcttttattttttgataagggaaatgctctttttgtaattgttgctcaagccaatttaaatgctctgtaacaaaagggttcgcatcatacgagaaataagaaattgggaaaggggaagttctattcacctctagcttaataaatttcccgaatccatataggaacgtgatcattgtgaaagcaattgtagagagcatcgctacaataaaaagcatattaatattcgtccgaatacggtttgctaaatctgaaatccaaagcatattaatccgtttcatataaaatcttcttcttttctttaaaatataaatcagtaagaaactaatttgagaaaagaaaaaatatgttcctattgtaacaagcattgggataacgaaaatactcgaaaccatatatataacaccgatttgcgggcttactgatacgaaatatttaggatttccagctaacgcataaccaccaaataaacaaatcgcaccaaataatgaaacaagtatggatggttttctttctttttgttttccaccatttgtttttaaaaggtgtaccgctttttttgtacgaataagcattggtgtgaatgcagatacaatgataaaaagactaaggaaaacaatggttgttaaaataaacgcgttagtaggaccgtataaatatattcctggaacatgcgtaagtttggctgttactaataaaaaaaattgagaaaaaacaactccaaactgcatgccgaaaaagatagataaaatcccgattaacatattctccataaaaacaagacgatgtaattgttttcttgatattcctaaaatggtcaaaacaccaaattgtttttttctaactttaaaaaaagtaccaatggaatatagtaaaaagaagaaagagaaaaatacaattactacttctgaaaatatcattaatcctgaaatttcagaggtcatgtcaaagttttgtaatttcggatggaataagtaaacagcaaacgaaaagaacacagcaatggaaaaggaactacttacaaagtaagcaaaataagctctcgagttgcgcgtgacgtttttaaatgcaaattgccaaaatgtcatagattatacctccggctagaagatatagaagtagttgtattgcaaaaaatgtatgagagtgtgttctcatacattttgcttgcatatgttacgatcatgcttcggtcaccttctccgtatgttctgcttgattatttgcagcgttgtggaagatgattttaatcgtcgttcctttaccaacttcagaatctagtttgacagagtgacctaaataatcacaaattttacttacaatataaagccccataccagtagattctccgaatgcgcgaccgtttttcccagtgtaaaatggttcaaatactcttcgaatatcttcttgcggaataccaacaccttcatcacgaacttctaaaataatatcctttccgtttcggtaagcagataagaaaactttctttccgcgctcaccagagtaacgaacagcatttgtcattaactgatagatgataaattttagccatttcgcatcagaagcaacttttaaatcagaatggacttctaaaacagggaagacaccattacgaatgaatagttcttttaatccgttaatattttttgttaccgtatcttttaatgaaatcgtctcaacatggaaatcttcatggaagttatttaacctagccatgtataaagccatatcaagcccttggtttagacgctctaattcttttttaaactttggaattaaatgctcgtcttccatttctagcaccataagctgcataacagaaacaggtgtcttcatttgatgtacccagtggttaatgaataattgatgttcttgttgttttacttcatacgattgtagttctttttggaagaggcggtactgcgtacgcacgagttcattgacaccgtgaggcatcggagcagttgctctttcaataaacgcatcttccattttttctggttgctcgcttaatctatggtacattctacgattgcgaacgtaacggtaagcgaggaaacaaataaataaatataaacttaaaacgacgaaataaaatttattgttttgaaatccatctactgcatcataaagaacgaaaatgataccgaagtttaaaacgtacagtaggaaaaatgcaaaatgatcacgtaaaaatagcttcatgcttattcactccaagttgcgttaaagcgatatccaagtccacgtactgtttcaatagagttctcaataccaagctcattaaactttttacgaagacgcgtaatgtttacgtttaatgtattttcttcaacgaagctttcgtcatcccaaagcgcagctaataaatcttcacggcttgctgtacgagggaatttagataataacatttcagctaaaatagcttcttttttcgttaaaagaacttgttcagatccgaagtgaatttcaggacgttctgggaatagttttaaaccttctacttcaacgatacgttcagaaatatttggtgcataatcaccgtaaatacggcgtaattgtcctttaatttttgccattacaacgtcgtagtggaatggttttgtaatgtaatcatccgcaccgctttcaattgccataatttgttccatctcaccagcacgcgctgaaatgaaaataattggacaagtagattcatgacgaatttgacggcaccagtagaaaccatcgaatttcggtaagtttacatcaagtaaaacaagatgtggtttcacagcgttaaacgattccataatatcatcgaaattctctgcaacaacagcttcataaccgtacttctgaatgtgagattgcagtaatgatgaaatatttggatcgtcttcaacgattaaaattttatacatatgtatattcctcctcagaaaaacaattgtagctatagtgtatcatgtgtttcaagtcttttcattatgttgaaagataagctagtaaacagtataggttaaaagtgagaaaagtaaaaagggcctcgtatataattgacaatcaactgaaatcattttaacatttagataagtatctaaatgtctaattatcgaaaggaagaaagacattgaatcaagcattcaaagcattagcagatccaacaaggcgaaaaattttagacttattaaaagaaggtgatctaaccgctggtgagatcgctgaacatttcaatatgacaaaaccaagtatttcacaccacttaaacgcacttaaaaatgctgaacttattcaagatgaaaagaaagggcaattcgttgtgtactctttaaacacaacggtctttcaagatttgttgacttgggtgtttacatttacgaataagggggaagaggggaaatgagaaagcatatatttccgttactattaatagctttaacgattattgcatggtgcatcgcgtggccgcatttaccgggagaggttccgagtcattggaatgtgtctggtgaggtagatgggcgtatgtcaaaaatgggcatgatgattttggatgttgcagttatggtttttatatatgctttattgactttattgcctaagatagatcctaagcatgagaattatgagaaattttctaaagggtataatgtaataaattatagcgtattattcctattatttttagtaagtatcattggaattggagctggattaggttatgacattccaatgaagagtacaccatatattcttgttggtcttttatttataatcatcggaaactatttaccacaatgtaaaccaaattactttgtaggtataaaaacaccgtggacattaagtaacgaggaagtatggagaaagacacaccgttttagtgggaaggtgtttgttgtattaggagttattatgattttaagtatttttgctccggcagcgtggaaaggtttcctaatcattggcattattaccggtgcagtaggattaacaatgggatattcatatattgcttataaaaaagaaataggggcttaataaaaaattatgggggagagaggatgaaaagacacgtattaccatggagtttaattattggcattgtaattggatggtatattgtatggccacatttaccagaacaaattccacgccattataatgcagcaggagtagtagatggatatttttctaaagtagaagcaagttctgtttcaataggaagcatgatgttgctgtatttgatatggctagctcttgggtatattgacgtaacgaaagataagtataaacagcatgctaaagtcctttccgcaatccgttatgctattcttttgataggattcggctgtaacttatttgcgctattagcagcgtctaattatattgcatcgggctcaattgcatttaattttggacttggaacattgtttcttgtactaggtaattacatgcaacaaacgaagccaaacgggttagtaggcattcgaatggactggacattagaaaatcctgtagtttggaggaaaacacatagatttgcttcgagggtatttgtaataggttcactttgtatatatgccggggctttgcttccagatccatttaatatttttatagggattggaatcatattaatatgcattatcgtatcaacaataaagtcatatagtatttataaagaagagttgaaaatgtaaataaagctgcttttccttttagggaagagcagctttgttttttatcacttcttcaaaaccggtatccaaatttcacttttaaagtttggagaagatatatctttctgtttattccacaatatctccggtccttccgctagttcatagttcgaagaagggaaccattcagagtaaatacgtccccatacattttgtaatgcatcaggaaatggaccgacagcttcgaatatagcccatgttgaagcagtaacttcaagctgtttaaactgctctggacaatcctttgttgtggctactccaatgtagtgatcgagttctcccttttcctccattcttccttcagaaaagttagtagaagcactaatgattccagtaggttcaatgtttgaaagggactttaatgtttgaatagaatctgggtttaaacttttccacatagaagcaatttcttcatttacaccgttaaaaacgattggtactcgttttgtaatacctataattcgaaatggctctttttcttcaattcgatagttcatttcatttcctccttgaatggataattggaaggtcattggtgaataagccttcaaagaatggctactatttcgggcttcagaaggtgttataccgtgcaagttttgaaatgcacgagcgaatgaatctggtgagttgtacccatattttatagcgacatcaatgacttttgcatcgctattttttagttcaaaggcagcgagagtaagacgtctacagcgaatataatcagacagtgatatacctgctaaaaacgaaaacattcttttaaagtgatactcagaacagagagctagcctcgcaacttctttaaaatcaatttcattcgtaaggttatcttcaatatagcgcattgcagtattcatatttttaagtgaatccatattatgacctcctctgtacatagaatagcaggaacgaaatagctccatccgacatttcgtgcacaactttgtaggggacatttttaaccttacaaaattgtaatgttcctgtaaggagaatgaatggatggtatgatatcccaatgttatagtaacaaagtacttttgttcagtaggttaaatttttatatctttacttatgcgtcttacataactgtcatgtttgtgtaagaaacatcgatagtggcaagagtagagagtgtatatagttgaaaatagagaatagaagaaatgagggatgtcgagatgaaaacagtgttagaagcaaaaaatattgaaaaagtgtacgacacgggtgggaataaatttgcagcgttaaaaggtattaacttacaagtaaaagaaggtgagttcgttggaattatgggaccttctggttctggtaagacgactttactaaatgttctttctacaattgataatgcgacgaacggtgaaattttaattgatggaaaagatattgtaaagatgaatgatgataagttagcgttattccgccgtgatcatttaggtttcattttccaagattataacttattagatacgttaacggtgaaagagaatatcgctttaccacttgcgttatcaaaggtgaaagcgagtgagattgatcgccgcgttcttgaaatctcaaagaaattcggtattgatcatattttaagtcagttcccatatcaagtatctggtggacagaagcagcgctgtgcagcatcgcgtgcaattgttacgaatccaagtatgattttcggagacgagccaactggagcacttgattctaaatctgcaacagatttacttgaaagtatgaagtcgttaaatgaatatgataactcaacaattttaatggtaacgcacgatgcgtttgcagcaagttattgtaaacgagttattttcattaaagatggtgaactatataaagaattacatcgcggtgaatcgacgcgtaaacagttcttccaaaaaattgttgacgtaatgtcttctatttctggaggtatggctgatgaccttatctagcattgccctccgcaacatacagcggaactttaaagactactttgtatattttgcatctatgatttttagtatcgttatttattttacatttaaagcactgcaatataattcacaaatggaaaaagcagcagaagcttcaaaaaaaattagcggagcgttccaagtttcaagtgtgatgcttatcattttcgtagcagtgttcattatatattcgaacggattctttacacgtaaacgtaaaaaagaagttggcttatattcgttattaggtatccgtaaaagacaaattggtaaaatgctcttttatgaaaatatgttaatgggattaatgtcattagtaattgggattgcgatcggtagtgtcctttcaaaattattccttgagttattagtaaatatgatgggattaaatttaaacgttcattttgaagtaccgatggctgccattattgatacagcaattattttctttgtgattattttatatacatcacttcaaggatatcgtttaatttatcgctttaagttaattgaacttttccgtgcagaacgtgaaggagaagcaatgccaaaaggatctgtcattatggcattaatttcagttttcttaatcggttcaggttattttttagcattaatgtacatgaaagcagttatgtatgcagactttatggtcgttgcattatatattttattagcgacagtagcagggacttatttactgttcatgttcttcacagtatttgtattgaaacgtgcaagaaataataagtcagcattttataatggtatgaatatggtaacgacatcacagttactatatcgtattaaaggaaatgcgaaatcactggcgacaatcgctattttaagtgcggtaacattaacagcggttggtacgtcagttacgatgtattacaacacatttacgcaatcaaaagttgctgcgccgtatagttattcctatgagaaaaaagatgcagcattagataaaaaagtaaatgaaatacttgctggagagaagaataatcacccagtcacatatgaatcagaagttgaaatgattcctgtgaagggaacatttaaaggtgaaagagctgatcaagttctgaacacacactataatgttacgaatcagtaccagcttatttctcaatcaagctttaatacacttgtgaaacatttagatgtagaacctgtaaatttaagtgcgaatgaagctttcgtatatgatagcttatatattgagaaacttgattttggtcctctttatacaggaaatacagctgtattccctgttggaaacgagtcaaaagaattaaaaattaaaggtgtaaataatagaagccttacaaatttaaatgaactatttgtaatcgttcctgataaaacatatgagcaagtgaaacaagtaaatgaaacgcgtactgtaaaaaatattgatgtaaaaggtgagcgaaatagtaaagagttaacagcaaaattagcaagcattatgccagctggagaatcagaagttttaaaaccatttaacgatttctatacaggattccaaatggggcttgaaacaacaggcttaatgatgtttattgggttattcttaggattagtattcctattagcaacaggctcaatcatttactttaaacaattaacagaagcaagtgctgaccgtgatcgctacgttgttcttcataaaattggtgtaacgaagcaagagatgaagagagctatcgcaaaacaagtgagctttatctttgctattccgttagtaattggtattttacacagcctatttgcactaaaaggtttatcaaatatattaccatttgaaattatgattccgcttctaattagtatcggagtatacggcgcgatttatattggatattacttcttaacagttcgttcttattataagatcgtgagtgcgaagtaataagggacagctatcgctagaggcgatagctgtttttttattcttcataaaatcttaagaaatctcctcaatttttgttaagaaataatagttatacttagaaacaagttaaaaactattgaacgaatgaggagaggtttatatgcaactcataacattcttacatgaatttattaaacatccgaaacatactggtgcaattgcgccaagttcaaaaatattagcaaagaaaatggtagatgtaattgattttaataaagcgaaatgcattgtagagttaggtcctggtacgggagtctttacgaaagaaattatgaagagaaagaagaaggaaacaatatttcttcttattgaaattaatgaagtgttttgcaaggaactaaagagaaaatttaaagatgagcagaacgtcattgttgtacacggttcagccgaaaatataaaaaagtatatagaagatctcaatatagaatgcgtggattacgttttatcgggattaccttttacctctttaccagaagaagtttcaaagcgtattttaaacaatgtaatggaagggatacatgagaatggtgaatttattacatttcaatattcacttgtgaaaaaaggatttatacagcacttctttcctgaaattacgctagagaaagtgtggctcaatttcccaccagcgtatgtctttagctgtaaaaaagagctaaggagagcatatgcataatggaattacatgaattattatcttatattgaacaatacggttattgggcattatttttctgtttatggttaggtattattggtatgccaattccagacgaaatgatcgtaatgagtggtggctttgtatcttcactagggatattaagtgtcattcctgcatttttattaacatatttaggtgttgtatctgggctttctttaggttatatattagggaaaatatttggtacgaaagtacttgataagctaatgaaaaagaaaaaggcgaaatatcttttgaaatctcaacaaatggtagagaagtatggtcattatgcgttagtcacaagttacttcataccagttgtaagacatatcgtaccgtatttagttggaatgaataacatgccatttaagacgtatgctttgtattcttatacgacaggatttgtttggacactcgtttactttgtgctcggtgctttatttggacaacacattgaaagtattgtagcgattgcgatagaatatggcttgtattttggcgtgattgtttttattgttacaggtattctttatttatatagacaaaaaagaatcacactgatgagtaaatagaagtaaagaaagtttcttccagtatgaaggaaaagataggattataagtataaaattatctttatttaatggtaaaatataggtaagtagttaagggaggaagagcgttgtgctactcatttttagccttatcttaattggaattatgtgcagtatgaaaatagtatctttacacatgatagaacgacaaaaggtagaggaatgatatgtatattgtccaaaatgtgatacaaaaattagaagaggaaattcagctcctttttgttcgaaatgtaatttaatatttttaagtaaacattaatccacctagttctctttcgtttgcttattagctaaaatggattatgaataacaatagtatgtaaacgaaaataaatataaatgtacacatggagtgttatatttggagattttaatcatagtaggatgcctaaactgtatggatgttaacctttttagagaaagatatcccagctaatttagtttggaagattgaaagaatagattgaaaatagatgagaagtggagtgcatatgatggagacacaaatcgttattggagtacctggtttatggaaagatagaacagaattaatacaagaagttgtgaataaaagtaactatatattagcgggaaatgttatgcaccataaggagaaagagattggctttgaaattgatatatatgaacaagggattgagtatacgaatattattgaaggatatcccattattatgaagtctttcgtagagatggattgagaagttttgagggttttattacctgatgacagggggattcttcctactaggccagagtgtgatgaatgttataagactcaattggatagtattgaggaaatttgataaaaaatagcttgaaaccatttaagctatttttgaattattacatatgctgtaaagtaggttttcgatttgtagtaatatctgctactgaataacgcttcgttttattagtgccagttagcccatttcgtatttagcatatttttttcttcttctgaaattatattgtctttataccagggtaaatgtttacaggtgaaattatcagctacccttacggcattataaaaaccgttactaataaattttttattgtaaacagcaaaagttgtatcaattccagcgttgaaaactttaggtttattgtatttagttataggaaaaagccaatactgcatttcccattctgttactgtacatttttcatttgacatgagctctctgttgaaattagaagtaggtataatgtctaaagcaaggccggctttaaagagtgaaagctcgattgttaactgctttaaatactctaaaaagttatctgacattttttcattaaaagataaatcaggatcagttacagcaaaaaaatctggaagtaaatcgaaaatataaggaacggcaaaaaaacgtggtccatagttggcattatttttcactaaattatatttagttgatatttgctcataaaaagcaagcaaagcgggagcggttgaattattgtcccaaatccatatatcttcactttttatctttttgttttctaattgttttaacatatttttcacataagtaaggttattgaaggctattactattataggaatgtttgaattatattttaagttttctatattagagagacttagttcgttcttacattcgaacacgatttataacacctccgagcaaaaataaaacacactgcattagaagcaacaatattccaatatatgcgtaagtaagagaaatggaatcggtgtacggcctatatatgatggaagtaggaaaagcatttttgttaagatagattgagtatacgaatagtgatgaaagaggaatttttctagctacatgagagcacggtaaacgttagataatattaatgaaaaggtgatacatgtgcaaaaagagattttaaggttattagataaaaagcaaagtaactatgaatttcctgcctttgataatgaatatatggatatttcacaagtgaaattctctcttttctttaaagatgctaaggattggctaatggtgtttcaaattgtgggtgtaggttcattaggtgtatgtaatgatattcaagtatatggcgatagaattactcattcaatgggtgatgattgcattttacaattaaataatggcgattatgagttgtttgatgatgaaggtgaatttataccgaatatttataacggcagtttaaaaattcgcgagcatcattttgaatatgaatttacagaagaggattatataaataatggaatagaagtacaaacgacagagcattatccaacatactttatgcgtatgctcgctactaatgaggaagctcaaaaattattgtggtgggataaaggagaaattttagaagagttcggtttagaaggcgactgggaagtagcgtatgaaacggaagaatggaaacatgttgaagacgaaaaagtaagtgaaaatgaattcttccaatcagtagccgctgcaatagagaagaaagatccaagtgttattgtgaatgaaaatgctaatacgcattggagaaattgggtagagtttgattgtgactgaaaaggataggagaaagaatgacaaatgaaaagaagaagaaaatccggagaaaaagtacaaatgcatcgttttgcactacctctatgctacggaagtgaagcaccatattattattacgaggtagcgccccatgaaagagaggaacgcttccatttaacatcagatctttgtgtaatggatggtgaacattattttattagaggatgtttagagattcctataattgactaccacaaaaatttcatatggactgtgtgggtatcacttagtaaagaaagttgtgatgaagtattagaaaagtgggatgaaagaggcagggaaaatagtgatctttattttggatggttatctgtagagataccagtttatccagaaacattaaatttaaaaacaaatgtacatataagagaagtaggaacggcaccgtatgttgaattagagccaaccgaccatcctttagcgatcgaacaaagaaatggaattactttagagagagttaaagaaatagaggaaatgatccaacaatataactagattagaagagaaaaaacgagtgctagcactcgtttttttattacacaaccgcaggattataaatcatcgtaaagtgtcctggtaataattcaatgtgacaaggtgtatgaagcgagttttctccatctgtatctacttctttttcttctttcgtttcaatatgaatggatttcgcttttacgtggaagatgtcattttcatttgagtcttcaaatagtttctttccgatgtaatctttaaatgcttgaatacctgttgatttgactacgaaaatatcaagtgttccgtcatcacattttacgttcggaataaaggatggaataccaccaagatattcaccatttccaaccatgacaaggacagcttcgtcttcatatacttgtccgtcataagtaatttttactgggaatgtttcagcattttttacagttcgaattgtgcttaaatagtaaccgattttaccaagctttgctttttcttctgcatcgatattgtttgatacttcagatacgagtccaatgccccagaagtttaagaaatgttgttcatttgcttttgcaacgtcaactggttttatatgttcttttgtaataagttttgccgcttctgcaatgttttgcggaacaccaagtgtgcgagagaagtcgttgcaagttccacctggaatgattgcaagtgtaggtctagtttcgagaggtgctaagccatttgtgcattcaaatactgttccatcaccaccaaagacgataattaaatctactttactagcaaactcttggcaatattttgttgcatcaccttgttttttcgtatgaaggatatgtagatcaggaaaagctgcggcaagaggtggtacgattttcgttaaatttgtatgtaagtcaccttgaccagctttcggatttacgatgaggagtactttttcaaattttgtctttgtcatatttcatctctccctgtagtttgtaatggaaagaaaggagctgttcccatgtattttagaacagcttctccctattaattgggtgctaagattgtcagttattgtcggtaagtcgatatattaaaaaaatcgccgatatacattttatgtactatcgattttttaagttatacgattattccgttacaactgaagcaatgaatggtaagttacgatatttttccgcacagtcgataccgtatccaacgatgaattcgtctggaatttggaagccaacatattcagctgttaagtctactttacgacgttctggcttatcaagtaatgtacagaacttgagtgcttttggtttatgcataaagaagtggtcttttaggaaatgaagtgttaaaccagaatcgataatatcttctacaacaattacgtttttcccagtaatgtttacgtcgatatcttttagtagtttcacttttcctgttgtttctgtttgatttccgtagctagatgcagaaataaagtcaattgttacatcatttttgatgttacgaattaaatcagcagcaaatacgaatgaaccttttaatactgcgataactacgatttcttctccttcaaagtcacgttcgatttgaagtgctaattctttaacttttgcttgtaattgttcttcagaaattaaagtgtcttttatttcaatattcattgtaatcctcctacagtgtaaaacttacgaacatttcgactgtaaaggatagaatagaaaaagtcaaaggagatagtaattttttacaaagataacgacaaaatcatctgatgatatgatatactaagtatattaagaaaacgcttccataaagggtgaatatgatgaagaagaaacagtacacaagtgtaacatttataaaagcattacttttaacaattgttcttggcctgttggcttacgtaattgatgtacctgtgattcgtatttcattaattggaatgactttagtgttaggagcaatttcgcatggtatgatgtcgcagctaaaagaagctggacttgatgatatgagagatcatatagataaaaagtgagaaaccttcattatatagagtgaaggtttttttgtttcttacaaaaatgtaaggtagttgtaaggcaaatcgatagttgcataagagcattttggataaactatgggtgtaaggtaaaaggcaagcatattttaggtaaattaagttttaggcactctatatgtgaaaaaggagtaggagggcatggagaaacgttggacgaccttttcttttttagcgactagtaacaccgtaatgctagatggaaaaatggattttttgcacttgtttgatcgtgaagatgatcattcttcttctaaatttacaatgaaatggaataaatggagcgagagttgtaggtttgaagaagaggcccctaacgaagagcaaaagattattttaacaaaccctattaaagcgtgggttgttcaacgtcgtaagtgtaacgtcaaaaatcacttcaagaaaactgagccgagacaattagttatcgctccggcccgttctacttccaaatcacgcgaaagtaacatgtaaataattgagacacacacccgaaaaaaacatcgtacatattgcgatgtttttttctttttctacaatgaaatctttaaatgaaatatatttcatctgcatcttatatttatatctcttgcttattctagtaatacatccgatgcgagtagatgtgaataaaatataaggagagagtgaaaatgaaaaagaaactattaccaatttgtgcaatggcacttttaacagtaggatattcttcagtagcgagtgcggatactggaacagtaacaaaggaagaagaagcgcaagtacaacaggataaagctaaaaaagaagaagcaatcaaggaacagcaaaaaagtgaaatagagaaaaagcaagcagcacaagtacaagaaaaaaatgatatggctaaaaaagaggaaacaataaaagctgagaaaaaaagtgaagaagagaaaaagagaatagcgcaagaacagttaaaaaacgatatggctaaaaaagaagcagcgataaaagccgagcaaaagaatgaagtagctaaaaaagaagaagcaaagccagttgtacaaggtgaaaaattaccaaatacagcatcaaataatgtagcaatgatgggattaagtgcatgtcttgtagcggtaggtacattatttggtttgaatcgtcgcaataagattaaagcgtaaataaaatattttcctataaagaatgggataatttcatatattaaaaatggtaggttactcctaccatttttggcatggaggaatgaagaatgaagttactcaattatatcggtatcatattgatggctatagggctattcatgggatcctattatgctgtggaatggtataaaggaagaagctctgccgggcaattaacggcagaagaaataaagagccttaaaaatatacaagatactcaactttctcatgaaacacctgtaacttctcaagtgccttcttctcaaacagaacataaagaaggagaaaaggtagcgatgttaaacataccgaaaataaagaagaagttttctatatattggggagcagatgatacgactttgaaaaaaggagtgggtatgttcgttagtgatttaacgacaactccatctggagggggacatactgtactgagtggacatcgagatactgtatttacagatttagaagagttgaaagaaaaggatacccttgttttagagtatgataataaaacgtacacatatgaaattcaaaagacatggattactcatgcggatgatcgtactgttattataaaaaaagaagaaccgatattaacactgacaacttgttacccatttgattatataggggatgcaccagatagatatattatcgaggcgaagttaactggcagttattcaaagtgaaattatagtttctgaaagcgagagggggatatataagttatgtcaaaaaacattttaattgttgaagatgaagacatattacgcgaaatattaaaagattattttttaagtgaacaatatgtagtgtttgaagcgagggacgggaaagaggctttagttgtatttgaagaagaagaggttgatttagttattttagatatcatgttgccagaactcgatggatggtctgtttgccgaaggattaggaagacgtccgaggtgcctattattatgctgacggcgcgtgtagatgaagacgatacgttacttggttttgaacttggagcagatgactatgtgacgaagccgtatagtcctccaattttattagcaagagcgaaacgattattagaaagtagaaaagcatcgaagaaacctttagagaacgaagatgatacgttatcgattcatggcatccatgtccattttccgtcgcgtactgttactgttgatgaggcagatgttagtttaacgcatacggagtttgaaatattggtgtatttcatgaaaaatcaaggaatcgttttaacgcgagagcaactcatttcaagaatttggggatatgaatttgctggcgatgatcgaacggtgaatagccatattcgtaatttaagaaataaattaggagagaaagcaaagtatattacaactgtagtacgaactggttataaatttgaggggaatgtatgaagaaaggaattgtactaaaattatttactcttacaacagcattatgtatgttgattttagcgacgatatttattggacaaacgatattttttaaacaatattatgcgaatcgaaaagtggaagatattaaagtgaatttaaattcttttgagaagaattatttaaattatgcaggaaatgcagaagaaattcagaaactagagcaagactttttaagagaaaataatacgtggattacgacattagataagaacgggaatttaaaacatgcagatgatttttattttgaagtaacgatagatcgtaggcaacaaaagagctttggacaacaaatatttaaaattcccttaggtaatctcgtcaatatagaggaaattgataataaattatcagagcagtttttagggcaagaaatttatttttctggagtgagaaaagaagatagttttattccattctctttttctttatctaagcagaatttaagtggatctaataaaccgttagaaaaagcatttaatgagaaaatgagcaaattaaatgaggagaaaaagagagcagttgaggaacaacttgttaaggaaaagaaaccagctgttcaggagcaagctgctcaggaattaggcgtttacataggaggacgtgttacaaaagtacagttaccagatgtaaaaggtcctgtgaatccaatttataaaaatggcatcttcttagatagcataaaagaatttcaaactaatttattattaaaagagagcaagcccatacaatatacaacacaaacaatggactatgaaaaaaatgatattaaatataaattattaatcaagccaatagaaaaagacggatcagtaacatatatttatgcgatggcttctttacagcccgtagatgaagctgtacaaatggtgcaagattattacatctatatcattgcatttgtagtcgttcttattttgttagcttcgttctattactcaaaacaaattgccaaaccgttattaaaaataaatgatacgacgaagaaaatagcacaattagattttacagaaaaaataccgattacttcaaaagatgaaattggagatttgtcgaaaaatattaatgtgctatcaaataaactccattcacatattggacagttagaagaagatattgaaaaggaaagaaagttagaaaatacacggaaagaattcatttctggtgtttcgcatgaattaaaaacaccgctaagtattatgaaaagttgtatttccattttaaaagacggggtagctgagcataaaaaagagtattattttcaagcgatggagagagaagtagacaaaatggatactttaattttggatatgcttgagctagctaaatttgaatctggtacatataaaatgaaaaagtctgcgttttatattgatacagtaattgaagatatatgtgaacatctatctgtggaaatagagaaaaaagaacttcatgttcataaaaatatacattcatttgaagtgattgcaaatcaaggccggattgaacaagtcatcgttaacttcattacgaatgccatacgttatacaccaaataaagaagatattattatttctgcaatagatgagaaggatcgtataaaagtttgtattgaaaataaaggtactcacattgaagaagaacaattagataaaatttgggatcgtttttatcgcgtggatacagctcgtcagcgttcacaaggtgggacgggactggggcttgctatttctaaaaatattttagaattacacgatgctgaatatggagtgaaaaatacagaagacggtgtattattttacttttacttaccgaaaaaagcgtagataatgcatgctacgctttttttaatttattttcatattatctttacctaatctttatttttaagcgatataatctggttagaaaatgaggttatgtaaggagtcgatgaaccgtgcatagcaattggctaagtataatggtatttattttcttttgcgcatttattgtatttttaattaatattacgatatgaaaaaagagcgctcattaagcgccctttttttgtgtattcatttgataagcactgatgcttttgaataagcgtggggaagtgaggaataaaaatataagtaaaactgtacataaaataaaagaaccaagcattgtacttccatttacgattaatgaatataacacagctgattgacctttcggcgcatattgtccccagaaaataataccggcaataaagtgacagaaatagcgagcaaagctaccgacaaatgtagcaaggataatgtaaacaaggattttcttaccatggttttgttttgctgaaggtttttcattgcgactacctaaacttgaatgttcttcactattttcattagacgttaaaagtgctttttgaattggacgatagaataagccagcaaatccgataaaagcaaaggcaatgaagtactcaatgaatgcttgaacaggtgttaaaatataagcatcccccacgactatttgtaatagtccccaaactaaaccacctaagaaagctgatttaaagccccagcggtaagcgataataaaaataggaatcatagcgaatgagatagaaccgcctgttggaagtttaagtgataatggtaaaatatcgataatcatggcgaaggctgcaagaatagcagattcgatcatcgcttgtaaattagtgttacgcatgttgtctccccctaaatccaagttgtacaaaaaagaatagatatcataggaggatacgaaatacgtaaataaaaatgaggtatgtatttcggacgtttgcacaatccctgcgttagcattaactaacaggttcgaagggtcggaacgaagtgttccctctcagcggcatggctcccccagtgataacgagattctttatttgctattgtttattgtaagcgaaatggatgagaatggcaaacgaatacagtatgacaataattgaaatagaattgtagcgaaatgttaataaatatgaagcaaaagggtatagtacaagagaaattgggtgtggtataatttttttgaaaataattatcattctcttctgagggggaaggttatgagtttagtagatattaaaattggagagaaagtgttagtaaaaagtattcagtctttagatcagctattaaagcgtagactagctgctttcggtcttgctgaaggaagcgaacttcgcctgaaacagaaagcgatgtttaaaggtccttgtacattggagtgtcgtggacagttaattagtattcgtcattgtgacgcgaaaatgataaaggtggaattagcgtgaataaggtagctttgctagggaatccgaatacagggaagacatcattatttaatgcacttactggttcttatgagtatgtaggaaactggagcggtgtaacagtagaaaagaaggttggtaaattaaaagatagacaaggaacattaattgatttaccaggtgtttatgatttaaatccagtttcacgtgatgaaggtgttgtaacaaactttctattaacagaagaatttaatcatatgttaaatatcgtagattcctcgcagtttgaaagaaatatgcatttaacgttgcagttacttgaatttggtaagccagtctcaattggtttaaacatggttgatgtggcgaagcaaagaggaattgtcattgatgtaaaacgattatcagaactattaggtgtaacagtcgttcctgttgttgcaaggagtggaaaaggctgtgaagaactgcttacgactcttaaagaaaatgacaaaaaagagaaaaagccattccttatttcatatggtgtacaaatggatgaaggaattggagaagtaattgctcttttagagacagtgaattacgagcatccgagatggttagcacttcaatttttaagcaataacgaagtagtagaaaaagaaatgaaagcattaccaatttataaggaactcatagccattcgatctcgcttagaaggaaaacttgattgtacgttagaagagcacatttacaaaactcgtgaagcgtatattgaaaagttaaaaacaaatgttatgaagcatgagaaagaaggaaaaattcctttttcagaaaaaattgatagattaattacacataaaattttaggacttccaatctttttagcagttatgttttttatttttcaggttacgtttacgtggattggtacacctttatctgatatgttagatgagttttttggtggccagcttacggattgggtgacggctggacttacaagtattggagcttctcattttattcaagcactcgttacagaaggtattattgccggtgttggtgctgtattagtattcgtaccacaaatctttgcactattctttttcatttcattattagaagactcagggtatatggcgcgaattgcagttgttatggatagaattatggagtttttcggcttaaacggaaaagcttttattccgatgattatcggttttggatgtaacgttccaggtattatggctgcgagaacgattgaacaggagaaagaacgtttacttaccattttagtaacaccatttatgtcttgttcagcacgattacctgtatatgcattatttgcgggcgtattcttcccgcatagtcaggcgactgttgtattttctttatatgttgcagggattgttcttgcgttattagttacaaaaattatgtctcttacgattttgaaagcggaaaagtctattttcgtaattgaattaccgccttaccgtgtgccacaagcgaaaacattatggctgagcacgtgggagaaaggaaaaggatttgttcgtaaagctggtacattcatctttggtggttcggttgtcatttggttattaaactatgcaggtccatcaggatttggtgttgatatgggagacagttacttagcgatgattggtggatttatcgcaccgctattcgcaccgctcggctttggaacgtggcaagctgcagcatcccttttaacaggatttttagcgaaggaagttgtcgtttctacaatggcaattatttatgcagttaaagaagatgtgcttggaaatgtaatgggagtacattatacagcattatcagcttatgcatttatgttctttattttattatatgttccgtgtttagcgacggtagctgttattaaacgtgaaacaggatcagcgaaatggacgattttctcagtcgtttatccactcgtagttgcttatgtattaacgctcattatatatcaagttggatccttactcggattctagaaggagatgtattacgatgatggtcaatattataattggagctatcatttttggttatgcagcatacacgttagttaattttgtaaagagaagtaaaaagggaaaatgcgcagcatgttctttaaataagtcatgtcagtcgaaaacttgtagtccagatatggaacaagttgctcataataaatagaaaaaagctttgcgaatgtcgcaaagcttttttgttttactttttaatttttacaagttgagaagcttcgacgccgttgtaaccagggaattctttacttgggtctttatcaaattttaatacacctacagatttttcatcaccttttacattgttgtaagttgcgtcatcgacaatcgcatacatatctgtatatgcacggccacttccgataattgtgttgccttcatattttaatttcgctccatcaagtgtagcattttttactttttcttttgcaaataatacaccttgttctgttgttatagctggtaatttatcaagtggtttcgtgttgtctttttcatcaactttgctaagtaactcttttttcactagttcctcaccagttttcttatccattacaagaacttttttaccatctaatgttgtcattttcattttatagaagtctttttctttcacttcttttttgtttttatctgtaatttgctgaacttgttcttctgagccgtacagtacaaaaccgttcgctttctctcctaataaagaacaacctgataatgctccaagtgaaattgctgctgctaatccgattcctactaattttttcatgatgatttctccttttatatgttttatattaaatacaatttttgtattattgcttacaagtgaagaagcttgtttgttgcttctggtattagtgtataagaaatattagaatgcaactatcgagttagcttacagtaacattacacttatgtaatttagtgaaattgcacaaaagtaagttaatttcaaagaggaataatgagaatatattagaaatacaatattgtatatagaatgtcatattataatggatgtattttggaaataacatgtaaggacatattagttttgttataataaacacataggctgtaaaaatgaatattctttactgtaaagggagatttttcagttttccaagtagtgaatttgaaatatgaggtatatcataggaggaatttagatgtctgtatttaaacgattaagagatttaacaatgtcaaatgtgtattcgttaattgagaaagcggaagatccagttaagatgacggatcaatatttacgcgatatgcaagcggatgtacaagaagctgagaaaagtgtagcagctcaaatcgcgcttgagaagaaattcaaaatattatttgaagagcaagaagcacttgtgaaaaaacgtgaagagcaagctcatatggctgttcaagctaataacttagatcttgcgcgccgtgcactagaagaaaaacaaaatgcggagcaaaagatgaatgagtataaagcaagctatgagcaaaataaagctgctgctgataacctgcgcctaaagctagaagaaatgcgtaagcaattaaatgagctgaaaaataaacgtgagacacttgtagcgcgtgtaaatgcggcgaaagcacaaaagaatattaatcaggcgatgtctggatttgattcaaactcagcaaaagctggtttaagccgtatggaagagaaagctcttcaattagaggctgaagcagaagcgagcggtgaagtttataagaaagaaaaatcattagatgatgaattcgcaagcttaaacaaaaattctgctgttgacgatgaattagctcgtattatgaagcagtatgagaaataatatagaatagagacaaatgaaccgacatgtctaaatatattcatgtcggttttctattatatttagaggaggttttgcaatgacatggacaaatgtattagccatgcttgtatggactggagcgagtgcagtacttttatttgcaattatgtgggttgattcaatttttacaaaatacaatgatttaaaagaaatcaaaaatggaaatacagctgtaacaactcgttttattatgaaattatttgcacaagggtacattttatctcaatcaattacgaaagcaaatgacttatggcaagcacttcttgcatcagcagtttctttcgttattttattagtggtagaaatgtttatcgaattcgtattaaagaaaatgtctggtcttgatttagaagaaggtacgaaagaaggcagcgttgcacatgcgatgttagctggatcattacatattgttggtgcacttattttaggtgcttgtttataaagagaaaaggaggggtaaatcatgagtttatttaaacgaattaaaaatataatgaaaagcccagagccaccgaagccggaaaagagtcttttaacgttagctcctggcgatatgattgaagtgtcattagttatgtatgaattaattgggaaaacgagtatgcattcgcgtaaggaaattgttttgacattgcaagatggaaaagacattcgttatttaaaaattgaagatcgtgaaaatacgtattacaaattatatacaccaattgatggtcgcttagattcaattgatgaaattccgacgacaattgaaatggatgataccgagtaccatatggaagaacaatataacggacgtgttgttgtgatgggaaaaactccattctcagcttcagaagaacagtacgtatgggaattccaatcagacaatcgaaaattattgcgtattgaatggcaaaatggtcgcacaatgatgtatgagggagaagcaatcattcctgctgatgtacaaattataagagcaacgtaagggggcgtaatcatgtcaaaccgattgtttaccatgattaaatcgtttgtaatccctatacttgctatcgttatattacttgttgttgctggttatgccttatcaggttgtcaaggcgggcagacaaagtcgattcaagaccgttatccacttgaatctgttgccaaggaaggtaaacaagaatcttacgtgtatagggccgccaatcggtcagttcctgaagtagcgaaggaactcattaacgaaagagaaccgaagcaagcatctaaagaagacgaaaatcaaatgttcctcgtttattctgataagatttataacctgcaaaaggataaagagaaaccatctgatacgttaattgaaataagtaataaagaatttgtccgtcaaaattaccaaccgtccttcttgcaaggatatattatgggtagcatattaaacgatatattcggttcaaaaagatcatcatccggtgattaccgaggatataatgacagacaaaatcatcaaccagttattccagaaagaccacctacaaaagaagaaaagaaaaccccacctccaattacgaaggaagggaaagggtctatcattaagcgaggcgataatgtagattcgaaaccatcagtaggtgataagggaagtattactgaaaaaggaagtaatacgacgcccccaccttctactggaagcaaggggaaaattacgaaaacaccaggcggttcaagcggatcagatgtgaagccaaaatcatctattaaaacgccgccaaggaatacatctcctccgaaaacgagggtcggtggttcaggaaagattacgaagagaagatagtgtagaggccaaaaagtggaatttgctttttggtcttttttcgtgttatgggaattaatccctttcagttggtacgatttaggcataagggggcgagtaaaaatatatcagcgattattagaatatatcgaccacaactcaaaatatatcagcgattattgaaatatatcgacttaccgacaaaaactgacaacgatagcaacttaataataaaaagagggtgtgccaaaattttggcacaccctcttttatataacgattaatgaatatcacgtttcttgaaattaccgccttttacttctgctacgtcataaactgtaataaaggcgtgtggatcgatttcattaataagttctttcattttactttcttctaaacggttaattacgcaagaaatttctttgaatttctctcttgaataaccaccgtatacttcgttatatgttgcacttcggcctaaacgatcgcgaattgtttctaccattaattcaggctcttttgtaataattttaaatgcttttgaaccacttaaaccaacttcaacgatatgaatcactttcgaagcgataaagtaagcaattgccgaaaggatagctccttgaagaccgaataccgttgatacgaaaataaatacgaacatgtttaagaataaaataaggtcactcgttccaaatggtaacttacgagaaagcaatacagcaagcatatcgatcccatctaatgccccaccgttacgtaatgctagtcccataccaaaaccgatgataataccaccaacaactgtaactaataatgtatcgccttcaataatagctggtattccgtgcatgacaacggtacctactgctaatgaagcaattccgataatagaataaatcgcaaagcttttaccgatttgcttataccctaaccaaacgaaaggaatgttaataactgcgattagagctcctaatggcaatccaaataatcttgaactaacgatacttaaaccagtcacaccaccgtctgatacgttatttggaattaatactgcttctaatccgtacgctgtgataaatgccccaataataatcatcaaagcttttgaagcaatttttagcttattgggcttgtttttgataattttctccatataatttcctcgtttcaaactagtttcttatttgttacgtaattcacacctaaattttattttaacatttaatttgaaaaaattctcctttaatggatgtatgcagggaatattatcaccatattatctttaaaatatttttgaaatcagtataagaaatcccatcctttcaaaggatgggatgctattaagaaaatataaaactaagtactgatacgaataaagcgaaacctaaaatagttccacatattttcatatggcgcttacgtcccattacgacaatcgcaacatattcgcgaatcattgcgttaggccagtaataaaatgcagtttttgacccgattccttggctattaagaccagcttgtctagcgtatatgccagcgcggaaaaggtggaaattatttgtggtaaaaatacttttatatttaccttcaggttttaaagaatccataatttctttagagaacaacatattttgatatgtgtttacagagcgattttcttgcaccgtatgttcaagaggaattcctttttcaacagcataattttgcattgcttctgcctctggaagaccttcatctggaccttgaccaccagagaaaataattgttggtggtgtatttacagctgcttgtttccaatagaagtcgatagctttattaatgcggcttgcaagtaatggtggtactttatcattaattaagccgctaccaagaacgataatgaaatcttgattacgtcttggtctgttgaattggtataaaaaatatgcgcttaagaagttagataagtgtataaagaaatagaagcttataagagaaatagctgcaaaaataggctctaaatgcgatgagaccaaacttgctgggtttataatagggagtaacataaagaataacatccctaaagcagcaaggagtgttaaacagttagtgaaccgtcttccttctcgcttcattaaaattctagcattaagaaatagcccaaacattaaagcaacaataccgaaaggaagcataataagaagtgctaaaataggtaaaattataatatagcgtaggacatcactacttgaatttacagatataatcacacaaaaaagaaggaaaaaacagacaaaggaattaaataaaaagccgtttattatttttcgcggatcttttaaatatgagataagaaaaataataaataatataagaggaataattccgaaatacatcataaatatagtacacctcaatttgtataagaatttgacataccttttatattacatgattttataagtgaaaatgaaagaaaaaggattttgaattttctcaataaaatatatggatacatatgttacaatatattcaaagcgatatattaaaagtaaaatggttgaaaaggcactcaatagagtgctttttctttttgtatgcaattgtgcatattatattttttttcaaatgaagaggattacaatataatttgtagacagactttataaagcagaatttaatacaaacatttccctctactttttgtatctaacaatcgtataacaataaataattctgttttatagtgtctgtttttgaaaggtgtcttttttgaaggcacctttttttattagtatagatagttttcactgttagcatagtgtaaactatctatactaaacattagcaatcttccgtataaatattatcaatttactatatattccagtggtgttaacctacatatgaaaggctttctttttcaaaatattacccctaataaaattttgaagaagtcaactgtctccaaacttgtctttatgcttaaagaaaaagcactcaaattgagtgctttttcttattgaaacatgctatttttctaggcgattttcataaaataaaagtaaagaaatgaaagtgggtgacaaaatgccggcagttgtggaaggtgttattattgaaaactgcaatggaacaattaatgtaggggataaatataacgtacagccgattgaaaagacgaaagcttataatggatcgggatcatcaaatacaggaatgaaagtacaaacgtttagcgggattagtacggcggatgtaagggataatgatgcgtatgatcaagttattcaatcaacgttataattttaaaatgcaaaattgcataaagtaacatgtttgttgtatgttacactctagctgtgagctgttaatgattcttctgtattatagttgttagattagaaatataacatcttatcgaaaatcatacgtacaaaaaaagacacttcaaacgaagtgtctttttttactttagtgataccctttagcagagtctttatgaattttatttttaaaaatactgtagctccaaagctgatatccaataacgattggtaccataaccattgcaacgaagaacataatttttaagtttaattgactaccagctgcgttatataacgttgtactgtatgcatcgttaatacgagatggtaacattcttgggaacatacctgcaaagccagttgtcataaacattgcgattgttaggcaaacgaatgtgaatgcaaggccaattttatgtttgtacaccataataagtgcgagtacactcattagcattgcaagtactggaagaatgaatagtaccggatattccgtaaagttttggaataagtttgtccgattagcagttgctacatagaagatagctaaaataatagcagctgccattgaaaatggtcttgcgattttataagcacgatcagatacttcaccagtcgttttaatcatgacccaaagggcaccggatacgacaaatatagcagtgaagaaaagaccacctaatataccgtaatggtttagtaagctaagtaaatttccttcatagccattttttccgatttgtagtccgtaataaagattagcgaatgtaacaccgaataagaaggcgattaggaaactgccaattgcaaatgcccatttacaagttttttgccaaattggtgaatcatctttatgcatgaattccagtccagcggcacgagcaaatagtgcaagtaatactaagaataacggtgtatataaataactaaacatattagcatatgtgactgggaaggcagcaaatgttgcgccaccagctgtaattaaccatacttcattaccgccccagaacgggccaattgcttcttgtaattgatttcgttcttgtcgatctttcgtaacgaaaggaaaaatcattccgttaccaagtgcatacccgtcaagaatgaagtaaactgtccaaatcacgccccataaaccgaaccagatgattgcaagcatatcatgagacatgagctacacctccctcagtagcaggttcttctaatgcggcaggtccttttttcgcgaacttcagcattaagtatacgtctgcgattaaaagtaaagtgtagaataaaattaaactaattaatgagaaccaaatttgcgggacagatataggtgatacagattctgctgtacgcattagtttatatactgtccatggttgacgacctacttcagcgacaatccatcctgcgttaattgcgatataaggaagtaagacagaccatattgtaattttcaaataacgttttgagttttctagttttccttttcggtttaaatagaagccataccaagttaatgccataaagaacatgccgagtgcaaccattaagcggaagctataatacacgaggttaacatttggacgttcatctttcggaatatcttttaaaccaacaatttcgccattaaatgaatttgtgtagaagaagcttccgagttttggaatcgtaaggaattcaaagttcttctcattttttacatcaggaatttgaacaattgagaagccttgtccttttccagtttcccaaactgcttccatcgcagcaccttttgcgggttgatatttagctgctgatacaccagattgatgtcccataaacggtgtaattgttgcggcgaataagcctaacattaaaccaaacttaaatgattttttgaagaattctacttcatttttacgtaataagtgataagcactaattgccataacgaagaaagcacctacgatataacaaccaactacagtatggaagaacatgttccaagcgtatggattcgtaacgagtgcccagaaatcatttaattcagcgcggccgttacgcacgacgtatccaacagggttttgcataaagccgtttgctgtaataatccaaagggcggaaatgtttgttccaagtgcaaccatccacatacagaaggcacggaactttggtgaaattttgtctttaccgaataaccatattcccatgaaagtagattctaagaagaaggcaacgagtgcttcgattgcgagaggggatccgaaaatgtctcccatatatttggagtactcagaccagtttgttccaaattggaattccatcgtaatcccggttataatccccattacgaagttaattgtaaataatttaccccagaaatttgccattttacggtatgttggattcaatgtgcgggcgtattgagtttccatacatgctactaaaatgacaagtccgattgtcaaaggtacaaataaaaagtgataaaaaatagtaattgcaaattgaaaacgactcagtaacagaacgtcggacataataaatattcactccttttttacattatctacaatcagtttatagtgaaaatacgtttaaagtatgtgaaacttgttacaaagatgtgtgtatattttgaaagaattatgtcgattatctgaaaatatcttatttttactataaagcgatatcctttttgagtttttcatattttggtacactatttatgtagtgtaaacgagagaaaagagggtcctttactatgaagtcattagaagagattttgcagtacaatgagaaatttgttgaagagaaaaaatatgaagagtttgtagcggggaaatttccaaacaaaaaaatggtaattatttcttgtatggatacacgacttgttgaactattaccaaaagcgatgaatatgcgtaacggtgatgtgaaaattattaaagtagcaggcgctgttatttcacatccatttggaagtattatgcgtagtattttagtcgctgtatacgaacttggcgctgatgaagtatgtgtagttggtcaccatgattgtggtatggcaaaaattcaagcaagtagtacgattgagagaatgaaagaacgcggtataacagaagagaaattagatatgcttcgttattctggaatcgatttagaacaattcttgcgcggtttctctagtgtggaagaaagtgtagaacatagcgtatcagtacttcgcaaccacccattacttccggaagaagtacctgttcacggtcttgttatagatcctgatacaggaaaattagatttagttgtgaatggttacgacaattaagaatttactttgtcatcctttttatctgggacaggatcaaatcctcccgggtggaaagggtgacattttaatatacgcttacaagtaagccaaaagcctttgaatgcaccatgtttttgaaacgcttctaatccataatgagaacaagttggataaaaacggcatgttggtggtgtcatcggagaaatgaacttttgataaaagcgtataatcccaataaaaatctgtttcataacggtctccttttcagcatattcttaaagtattatagcacgactgtacataatactttactaatgtgcatttccgttatatcatattggatataacggaattaaattaaaagcgggagagatgttgtatgccatcagtagaaagctttgaattagatcatacgattgtaaaggcaccttatgtaagacattgcggagttcacaatgtaggtagtgacggtattgtaaataaattcgatattcgtttctgccaaccgaataaacaagcaatgaaaccagatgttattcatacgttagagcatttattagcatttaatttacgtaaatatattgatcgttatccgcactttgatattatcgatatttcaccgatgggctgccaaacaggatattatcttgtagtaagcggaacaccgacagtacgagaaatcattgatttattagaactaacattaaaagatgcggttcaaattacagaaattccggctgcaaatgaaacgcaatgtggtcaagcgaagcttcacgacttagaaggagcacaacgcttaatgaacttctggttaagccaagataaagatgaacttgagaaagtttttggataaaaagaaaaactgcctgtgaaagggcagtttttttattgtgctaagagcgactatactcttcttttgtatgaaaatatattagatactccaacatataaaataaaggcagaacagagaaaataaacaaatgctttcgctttttgctgcttctttatttcatcgattccaaaaaggatacacataatacttaaaaggatagacacgtaaggtaaaagaatagtgaagtttgcaaagaagctaaatagggcgagagaaagagcgatagtggcgattataatttgaatgttttttaacatggaatcccccttaagtagaaagaaatagttactgagagaaaataattataaatgctaaattggtcaaaatttcattctacatataacgaaagtagtttgatattaaaaagaagaatatgagactggaaacgaaaaaatacgggatactcattgattttcgtccggatttcaattcattaattcctagaagaataaagaaacaactgagaataaattgtacgtatgggagaagtgaaaaattatcggtaacatggatataagtgcttagaatgagtaagagaagcatgagaaatgctaaaaaactccgtaatatagttagagttagcattgtatagcctcctttagaccatttactagaatatttctgtgaaaccaataaataaagcagcggcccctgctagtagagcgagcagactacctcctgtttgtcgttttaatatttcctctaaacttatggtgagggccatacctcctaaaaagatgaacatataaggcattatttctctactaccagtaaaaaatccatagattgctatagataaggcaataagtgataaagtaatccgacccccttttagcataaaagacctcctctattttatgtaggtaataatgagaactatccaaatgaaagcaccggcaataatacaaataaatccagttgctaattcctttttctttatttgttcaaatgcgatgagaaacattaaagcccctaatagaaattgtgaaagaggtaaaaaattattttgacctgtatataatccaattgccgacataacgatcacagtgagtgctactatgatgcgaagtatacgaagcatattaggaattctccttattcttttttgtataaggattgtcttctagtttatcgacggaatgtttataagcatagcctttattaattgtcatgatggagagtacgaggatgattaggacgatgataataccgataattaatattttgaacataaaatccctccttttctttattttacataattttgtaattgatgaaaacaatagaaaataaaaggatgaaagaagggtgttacatggagacgaaaaaaacatattatatatcaataggaaatggtcaaatttcacaagtgaagacggcggatacgtataattttgagatttccgcaaatgatgaggaaattacggaattaagagagcactttgatcaagcatatgtagaagatttagggtcatttgtacgctcccacgttccatttgttgagtatcatcacgattcaaataatgaccgatatgatgaacaactacaaaaagcatataaaatgatttacgatttaggaaatcatgagacgaaagaattagtcgcgcaaatgggaataatcaatggattgtaattggataatattatgcagaaaagcgagaatatgctacaatttgtggtaggaaaaacttgtaaccatcaataggggagtaatggcatgtacaaatttaaagattattaccacaacactgtacaattatcgtttgaacgttatccattttctcctgagccaaagcatgtttgggttgtatgccggtacggggatcaatggttattaacgcatcatttacgtcgcggtcttgaatttccaggtggtaaagtagaactaggggaaacaccggaagaagcggcagttcgagaggttcatgaagaaaccggcggcatagtttctgatttaacttacttaggacaatacaaagtatctggaaaagacaaaataatcattaaaaacatttattttgcaacaattagtgcggtagaagaacatacgcattacgaagaaacgaaagggtctgttttattaaaagacattcctgacaacattaaaacgaatagaaaatttagctttataatgcgcgatgacgtattagcgcgtacgatgaaacatatagaagaaatcggctgttttacgaagtaaagtagccggtttcttttttttgtatgtaagaataaatgtaaatatatctttatattattttgggtatattatacaattttgtaaagatatatttacattttaggaggggaaagatggataaaagaaaagaaacgactgttactgtttcgatggttaaattaaacttttctttattttttataataattgctttgtcgtttggaattggttatttgcatatatttctttcgggtgggggcggattaaagtttcactttatctccacctctaaaaacgaaagcacctccaacaaatcatctacgatacgtgaatgcttaaaattcccccaaaacgaatcttttttccaaacaccaagaatccctacttgttcagaaccaagcacatcgttttctggatgatctccaacataaagacattcttctgccttcacatctagtctttgcaaagcacgttcgaaaatttcaggatgaggttttttaattccttcagcttctgaaacgagaatggtgtttgtatacgtatgtatatgtagtgctcgaaggttgctcatctgaaattcagtaaaaccatttgtaataataccaattttaatgtttcgctgttttaactgttgaagtagttcatgcgtgtttttgaaaggaatacaatgatgttggaagtttgtaatatagtcgtgtagtagttgttcttgcgttaaagtagtaatgttgtattcggaaaggagagtagcatatactttatccttccacgtatagccattattatcgagttcaagaaatcgagaacaatactttgatttctctatgctcttcaaatgtgaggcgaagcgattatattgctcacaaataaattgttctaaagattggcgccgatctaatagtgttccatctaagtcgaataagattgcacgaatcatgggaagcctccttgcagtttttataattaattatcgcatattcgtaaaaaaatgattatgatattttgtagaatggaataatgggggattgtatgaagaaactgtatggcaagttagtgtgttgtattatagcaagcagtttagttgcaggatgcgagagtgctatcgaggttacgaaagaaaaagaaatttgtaaaacagaagaagagtgcacgcaaataggagataaaacattacaaaaagtatataaaaagatagagggactttcagaacttgaaaaagtagaggattatgacatagaagagtatgaaagtatgaatatgaaagaggcggaacagaaaaaagaagaggatgacaattacttctttttagcttcttattatatcgatgatgatgaaattgtagatccttattttgagaaattggatcgtaagagattgaataaagtttttgcagatgacaaagtagcaaaagatgatttgttaagccagcggcaagatagagagtatcatgaaacgttatgggacatgtaccgcactctcattccagtgaaatatcgtgagaatataacagggttggatttaataacggatggttatgacggcgttgttgcccatgtcatgccaagtatggatgacccgagagattggttgcttagtttagacgtgctcgattctggggtgaatatagatgaagtgatgaaaacattaattcatgaaacggctcacgtattaacgattgggcataaacaagtaccagtggataggaaatatttagaggcgtttgatgaagagaaagacatttcatcatatcgaaataaatgtaaaacggtgttcttgaaaaatggatgtgcgagaaaaacttcgtatattaaccaattttataatgaattttggaaaccaattgagcaagagtggacagaaaagaaagtagaagaaagtgaagaggcacaaattgaattttataaagaaaagcatgatgattttgtatcgctgtatggaataacaaatgtaacggaggatatcgcagatacatttacagcgttcattttacaagattcaaaaaaggtgaaagaaggaacagagttaaaatataaaaaaattgctttcttctatcagttccctgagcttgtaaaaatgagagcggaagtgctgtcgggattatatgatgtttcaaaaacgatagaacaacaaagtggagactaatgtgaggtatgctttcgatatagtttcgttaaagaaaagcgtgaagaatttttaattctttgcgtttttttatgttgataaaattgaaaattctgtatttttattaaaaagaagaaggaactttcggtataaaatagaattagtataaaaatgtcacaatttagacacaattataatgcgcgtgttgtagggactataagtttactctcgaggaggtaatgaaacgtatgaaaacgattcttgctgttgctggtctcatttgggtaatgtctcacggttttccgatttttgaaggggagcaaattcgtagtgctttgaatgaaaagtttaatgattatcatgtgatagatcgaaaagataatgtcgttacagtacgtgtgaaagactgtttccatacagttacggttgcggatggaaacattacaaatgaaacgaaaatgtgtgataaaaggtaaaagaaagaagctgactatagcgcactgttttgagtcagcttctttttctttttccaattagaattttttcaaatgcctcaacaaatacatacataagagttgcaagaacacatgtgagtagtacgctaagtaagacgagtgtgaagttaaagacttggaatccgtagctaattaagtagccaagtccttgtttggaaacgagaagttctccgaaaataacaccgacccaggataaaccaacatttacttttaacgttgagataattgctggaaaggatgcagggagaacgacttgcttataacattgccatttatttgcgccaaatgtgtccatcacttttatatagttagaatcgacttcttgaaatgcactgtaaataacgagaatggtaatgatgatggaaatgattactcccattgcgatagaagatgaaatgtttggaccgaaaataacgatgatgattggaccgagtgcaacttttggcattgcatttaggacgacgaggtaaggatcaagtacgcgggctagaagtggcatccaccaaagaaatgtggcaataatagcaccgagtaccgttccgagaatgaagcctactcctgtttccagcaatgtcgtccatatgtggacccaaagtgaaccgtcgatccatttcgttaagaagagatcccaaatactcgaaggagaactaaagagtaaaggatcgatccattcttttttgctagctatttcccatagtgcaaagaaaagaataagtagtaaaagctgtaatgagcgagcaatccaagcacgcctgcgttctttctttcgaaattgttcatgtagttgttttatattatccaagtcgttccagctccttccatatatcttgaaagagggctgggaaatcgtagtgatggcgtgcttctaacggtgataaagaacggatactttccgggacgataaaggtttttgcgatttttccaggattcgcttgcagtaaataaatacgatcactcatcgcaatcgcctcttcaatatcgtgagtaacaagtagtgatgttttcttatatttatttagtaagttgaaaacgagttcttctagttttaatttcgtttgataatcgagtgcggagaatggttcatctagtaataaaattttcggatcagttgctaacgttcgaacgagagcagcacgttgacgcataccgccggatagttcacgaggatattgtccttctaccccatgtagaccgacttgttttaaaagatttaaagtatgttctttcatctgttcatcataaatctttcgaatatgaagtccaagcataatattttcttcaattgttttccacgggaataagtaatcttgctgcaacatatatcccatagatgaagttttcgttgtaattggttcaccatctaaaaagacgataccatcaattggatcaagtagtccagcaatgattgagaggagcgttgttttaccgcaaccacttgggccgagtatagaaataaattcgccttcttccacttgtaagctcatatcttcgagaataagtttggcattctcttttgcgaaaaaacagtgagaaacgttacgtatttgtaaaaaactcatacacttcgcctctatttcttaataacgctttcggcaatttttgtattgacgagcgcttcatgtgggacttctttttgtaattcaccagcatctttcataatcgtttggagctgtttccattcttccgcatctagtagtggatttgtcgcataagaatgttgttttttataccgttcaattacttttactgtaatgtctttcgaagtgtctttaaatagcggagaaacagcatcagcaatctcttctggactatgtgtatcaacccattgctgtgctttatagagcgcacgtgtgaacttttcagcagcagctttatctttctttaagaaactttcttttgccatgaacgttgtataaggaacagtaccagattcatttccgaatgaagcgacgatataacctttaccttctttttcgaatatgcttgcagtcggttcaaagagctgcacaaactctcctgtaccagatgcaaaggcatttgcaatattagcaaattcgatattttgaattaagttcgtatctttccgaggatcaatgccatttttctttaaaacgtattccccaaccatttgcggcatgccgcctttacgctgtcctaaaaatgtaacaccttttacgtcattccaattaaaagagtctagttttttacgtgaaactaaaaatgtcccatctgtttgtgtaagctgtgcaaagttaatgacagggtctttcgctccttgttgatgaacgtaaatagacgtttcagaaccgacgagagcaatatcaattccgccagataatagggcggtcatcgttttatcgccaccagctgttgtttgtaggtcaatatttagtccttcatctttaaaaaatcctttttcaatcccgacatataatggggcatagaagagagaatgggtaacttcgccaacgcgaatgttttgagtttgttctttcgtactttcttttttactactacaagcagcaaaagtaaaaacagctagtaacatgatgcaaaaaatcgcgattaattttttcactatataacacctcctagaagtcactctacaagcatgatatgtaggtaagtgcccatatgtgagtgtagatagcaggaattttttgggtggtaaagaagtacaaatataaggggtgataaaatggagtacgaatacgatgatagcgtacatttacatcttgattatttcgggacagaatgtgatatggaatcgatcgcttataagaggaagaatgaagacgtatgggatgtgtattttaattttggagtatacggtattcagaaagacgatgtagagttaggtaggtttatggacgaatatgccggttattacgttttttctgtacatgctcgcgatcttagttgggaatttggaagtgcccagtttgaagagtgggttttgaaaaatcggatagtagaaaaaacgctacaaaaataggaggaattttgtgattggatttctcatcttattatttatttttgtggccggattttttattatgcaaatgcttatttaccgatttgcaaagaaaaacatccataaatatacaaaaataaaatggtttcatatgtggctacatatgaatatgaaaaaaggaccgagattagatttttttgattttgtagttatagtgctcgtatgtatcgtatggaaaatatggctgctcccttttatataatacacatactaatcattttctcttttcgttatagtaatagttgtaaaaaacttgcatttatacgtaaaacagtgagtggtgttgtgaaagatattttgacaaatacagacacacatacatacggaattaaagtgtgattacagaatggacaaattggccgtgtgtaaagtgtgggggaataagaaagaggtcgtccaacggtggacgacctctttcttattatgcttgattagtgcggaagaatggaagcttctgcacaatgtgaattaatccgtatgcaagaattaagcacataagaggattaatgaaaaatccatagcgattaattgctaagaataagtttgagaagataatgtaaataattgaacttgctactagcatcataacgcgtttatgtttaaatgaatttagcatgaagcagaagctgctcaagaatgtaccgatgataaacactctatgacatagttgcataaagttgtgaatacgatattggtctacagcaggagctgttttgaataattcaattgttttaccgacagtgaaccaagagaaccaataagtgaagtccgtcttaaatccgttcttaattaattcttttgcgtatgcacctttgtcatctaagcctttagctctcatttcatttactatattttcatatccaattttattaaatggatctgcaccggcaattagtggatctgcaccttgggttgagaataaaataaattggttgagtgctaagtagttacgaacaacccatgcgccaataataaagaaaggtccgataaaccataacaatccgattcgaatggattctttaaatccatatgtaaataacacaacaagaacaggaatgagcatcattggagctggatttggacggaacataagtaaaattgaaacgacaattccaaaccatatatggaatttcactttattgtatttccatgcgagaacaaatacatatacacataacgccaataagaatatggatggaacttctgttagcaatgtacggaagtatgtatagttacttggataaatagcatataaaatacttgcaacaattccataaatgtttttttcgaacaattcttttcctattaagaatactaatagcactgtgcaaaggttcatgatcatgttaataacagttgctacgtaatagtaaggaattgatgtaatatcagaaataatcatagcgccagctaatagtaatggctgacctggtgtaatatatgcatttttccctggaacttcactaggttctaaatacacataaccaaatacaccatgttttaatagttgttcagctgttaacgaatagttaaaggcatcatttgcaccatatgttactttgactaactctccatctaatcctggctgttttactaaacaaaaaacgtgcaacaggaaagaaagcgccaaaattgcatataccgctttaggcaaactcttaaacttagtaagcaaaaatgagcaactccttttttattaattctttcgtaattttatgtgaaatctttaatagtattaaggatttccaaaacatagttattatatcataaagtggaatgctgaaattaagtttttcaagaatgagtaatttgtataccacaatttaactgttgattaagggaagattaagacaatacatttatggtagaagcaagtatgctgacgaaatatgtaatatatgttattttaatagaaatagttctttcgatgcggggaaattaagacatagaaacgagggaatgaattgaagtatggttctacactttttcatcttccaaaaagaaatatattaatttctagcattataagtagtatggtgactttattagtaataactatgctgtttatgattttaaaggtttttaatttagacatgatgaaagatcatttaaatcaaaagcttgttttaagtgttatgatgatgttcatatggggcataacgttttatattacgcatttcattaaaaaagagatgtctatacttagagcatccctgcgagtgcattttatattacttttattagctcatacagtagcgttattttatattgtcatgcaagttaatatgagtttcatagaggcaatgaattggatttacttttataatatgcagtttatattaagttttgtagtaatttatgcgatatatattcttgtatataatttaataggtaaggtttttctaagtatggttttaacgagctgtacgttagtcattttatgtattgtgaattatttgaagcttatttttagaggtgatccgttatatccttctgatttcacacaaattactcatatgcaatctgttataccgatggtgatggactattttagttggagttatatttttgtcattatcttaagtatcgtagcttgtattgtagcagggatatatatgagaaggtatattcaaaatgtaaagattcatctaggaataagagccttattagtagtaggatctatttttgttctatatgcgtatggcaattttgcgaatacatttatgaataaagtatttcaaaaatcaggtgtagattttgttttgtggaatcaaaatgagaactacgcttcaaatggttttatacttgggtttattagcaatttagatacaacagttatggaaaaaccaaaaaattattctaaagaaaatatgcttcaaatagcaaacgatataaaaaaacaatatagtggaaatatagggagtcaaaagaaaaaagagaaaccgaatattatttttgtaatgagtgaatcgttttgggatccgacgaaagtaaccaacctttcttttagtgaagatcctgtaccaaatttacatcattatatagaaaactttcctgggggacaaactatttctcctacatttgggggaaatacggcgaacgttgaatttgaggcattaacaagttattcaatgagtttgttaaagccaggttctataccatatcagcaggttattacaaataagaaagaaattccatcaatccctacggcgttgaaaaaagaagggtattacacaagtgcaattcattcatttggtcgcacattctttaaacgtgatgatgtatataaggtgttaggatttgataagtttaatgcagaggacacgatgaaaaatgtggatattgatggagattatattagtgatttagcgatgagtaaagagataattgctgagttagaggaacaaaaacagcctacatttattcatgcagttacgatgcaaaatcattttccatttacagagggccgatttggtgaaaacctaatagaaattagcgggctagaaaatgaagaatcaaagggagaattagagacgtatacagaagggttaagacgttcagatgaggcacttcaatatttaatagagcaactagataatttagatagacctacattattagtattctttggagatcatcttccatcactaggaacaaataaatctttttataaagaaaacgggtatataacgaatgaaaaaacaccgagtgaacgtttagcgatggcgcaaacgccgctattaatgtatgcaaactttgatatgccaaatgataatttaggtttagtaagcccaattcatttttctaatcttatttttgattatgcaggattaaataaatccttattttatcaatttttatcggaactttacaaggaaataccagtgcttagagatgaattaaaagttgataaaaatggagaagtaatcaatgatttaacaaagaaacaaaaagaaatgttagagcaatataaaatgctccaatatgatttactcgttggaaatcaatatagtacagatatcctctttaaataaaagaaacaaaaagaacttgtataacgatacaagttcttttttcatagtatttaacggggtaaccagacaagctgggtttagggagtattacctgtacatttagtatatatgaaaatgtaatcgttttatttgtgtatttgtgagaaatatgtgaattttatgttttgtgaaaaatctattatattaactttcgttcttgtattgcagttgttatgcatgtaaaaattttatcagttctttatttaattcatccgcttgatcgattggtgaaccatgaccactatttgtaagagcatgtaactgagaatttttaattcgttgttgcgtaagctcagcacttttgtaaggaattagttggtcgtgaacgccgtggaagatttttgttgggacgttaattttatttaaatctttcgttacatcttcatttgcagctgcttgtaaaattttgataagggcataagaagcggactgcataccgagataagaaaaccattcaagggttgcagcccctaagtttctattgaaaaaggataaagatacgtcatttaaaaattttggtaaattagcatacatttgattaatgagagcatctgcttgttctttcggtacaccgtaaggggactcttgatttttaacgaaagagggggagacagcgtcaattaatgcgagcttagaaatgcggcgcccatgatagcgagacatatagcgaatagaaagagcaccaccaactgagaaaccgactaatgtagcgttctctacttggagtgcttctagaacaattgcgatatcatcggctaatcgatcatacgtgtaaccagtccatggcttatcagattgcccattccctcgtatatccatggcgatacaacgaaagccatgctctggtaaaacattgagttgatattgatacatttgatgatttaaaggccatccgtgaacgaagaaaacagtcttactacctggaccaggattaacgtcttgcacaaaaatatgcacatctttctcgacagtaacaaacataaaactccccctgttctatcaataggctccattctaaaagctttgttttactttttaggccgtctatataaaacatcctccataatatacgtattaatgatcatagattttatgctctgtatatagtctaaatatattgcgtttttggtacgattttcctcaaatgttcgatttatctttgtttgtctatgaaaatcatttattataataaatggtattctttgagatgttattttgaaggggtgttgaagtgaaagaaagttttctatcatataaagaagaagaaaggaatgcaaaactccttttatgggtgttatatgtcattgttattgtatatcaaattttctatgcaatcgtattagaagataaatcaataatggataagggatacaacataatatggcaagttatttgcggagtagcaatactatgcgtgaatatatatttactgaaaaaagagaaggcaaaccttgttaaatatgcatggatatttgcatacatagggatagaaatcgctaatatagtttcgtatattttttataataaggcggcgtttgatgcgacaaatataatagaaattattctcattttctttgtacccatatttttaaataaaaaattttatgtgtttttgctttcctctattgtaggaaaatatttaatttatttatttgtattagaggaaataaaagcatttatgttccttattatgtgtacacttatgttaatagttgtatatatcattttaaatcgatttttacaatatctttcagccgtaaaggaaagtattgcgattgctagtgaatcacaaaaattagcagtaatcggaaaaatggcagcgactgttggacatgaaattaaaaatccactggcttcattaaaaggatttacgcaattacaacgagagaagcatgaagaggatcctatttataaacgtatgatttttgaaatagaaaatatgaataatatgataagcgagttgatggaagttgctacatgcaaaccttctatttataagaaacatgatgtaggaaaaattgtattacaagtaataacaagtcttcgcggaaaaatgaatgaattaaacgtgcagtttatttctaatgtggaagaaaaaacaatagaagttgaatgtgatgaacgaaaaataagaggagtctttttatatacgataaaaaatgctttagaggcaatggaacaaggtggcatattacatttgcaattagagaataaagggaaagaatatataataatcagcgtaatcgataatggtcatggtattaagcaagaaaacttaacccgtgttacagaagccttttatacaacgaaacaagataaaattggtctgggacttacggtagcgaatcgaattgtcgccgagcaccttggtgagctgcatatttcaagtgaaagagatactggaacgagaatagacatcattctcccaaggaagtgtggaaatactgaaatccaagtggaagaaaagctaggagttaccatatgaataaaggctatatatttaaaaatgaagaaataaaggcattgaaagtatttttaagtttattttttattatattttttgtgtatgatcttgcctatgaatttatcgtacctttaatcgcgggagagcaagaaggcgtaggaaagtttgaagatggtttaggtttatggctttactttttgacggtagtattgttttgcagtggaatatactttatgaaatggaagaatgtttttgtggtaaagtatattattctaattggctataatgtattagattgtatccataacattatgatttattatggtagcgatgcggaatttgacggtggaaatatagtagaagtattttttattttgtttgcaccaatctttgtgaacaaaagatatttctggttagttccagcgatacttgtcgggaagtacgctcttacaggaatcattattcaatcttctctcgttttaatcccaatggcattatatagtgtatttactattatatgttggattatatttttgagggttcagtcttacgttcgtacgcttgagatgatggacaaagaaataaaacagacagaaaaactagcagctgttggaaaaatggcaacggttattggttataagattagaagacctttagcaaacttaaaaaaacttgtgaataaacaagccgacaagcatccagaggataaaatttatagtgatattatgaaacaagaagtagatcggattcatataattgctacagaacttagtggatttgagaaatctaaatcactagaatcagaaactcataacatacaagaaattatctcttatgttattcgagttatggaaaagcctgctttaaaacaaggagtccacatacaaggtatttacagtaaagacttaccgtccattacatgtgatgaaaaacgattaaaacaggtcttttttaatttaatcaaaaatgcaattgaagcaatgtcagttgggggaaaaattacgattaaagttactgtaaaagatggaatcatcgttcaagtgaaagatgagggatgtggtattccaaaagataaaattccaaagttaaatgaagccttttatacaacgaaagaaacaggaactggtctaggtttagtagttacagaaaaaattattaaagaccacaatggtaaaatgagttttgaaagtgaagttggggttggaacaacggttgaggttatgttaccactgcattaaatagaaaaaacatcacttatttggaagtaatgcttttgtgttcttcttaggtagacgttctaaaaaagaggacgataacgaaaaataatatattgatagtgtaaaaagaaaataatggatgttttactatgaaaaatatataatggctttgtctgttatttgttgtagttcatttatatttctatttgttgacccgaatctcgggtcttttttttatgaaatgaattgctatatgtcagtgattagaaaaatagaatatacagcacttgcagtaattccaggggtaatataaagggatatagcatctcctcttgcaactgggtttccagttgtaatactagtccaagttacagtagcggaacctactgccggagtaggattaaatacttgaatttgtcctactccgctatccgttggtttaatggaaaataccatagttctggtgtttccgttagaactgctgttgcgtctgccgtcgcaactaaagcaattaagtggtacatatacgttctcctttctatattttgaaaatctagtatttaaaatataacttaatatatatattatgaattctatatttttgtgtggcggatcgtattttgtgtctagatttcaaaaatagggtgagagtgtattgtatatcgaatttttttctataaatacagaataataagtagttataaaatatccattacttattttgaaaatctagtatttaatgagatgagaaaatcatctgttttcttaataaaatcatctggttgcacagtaaatgtagcagattgatagtttggtaaccattgtacgccaatcgttcgtacatctgcctgttttccagcaagtatgtcagcatcactatccccaataaaaattgcttcgtttgcatttacatttaatgtatttaatacaagaagaataccttcagggtcaggttttggcttcattacatcatctccagctactatacagtcgaagaaagaaactaatcctaatgcttttagagaaatatccaggcttctttttgcttttccagttacgatagctaactgaaacccttgtttttttaaatgtattaaaaggtctactatttcatgatttcgctttacgtaatcatgatgcttttcttcataacattcatagtatctttcaactgctacttctttttcttcagaaagtaagttctcatgaataataccaacttcacttggaccaaacatagaaagaatctctgcttcagtaatttctttattatcaaattgccaaaaaacgttttgaaacgagtaataacataaaggtaaagtatcagctagtgtgccatcaaaatcaaaaataattgtacgtagcattttctcacttccgttttaagttattttaaggtttatttaagagattttgttgtgatatacttaaaataacttaaaagtacttaaaagtaaatgaaaatgggtgagagtatgaatcaagaggaacgtttaataaaaataatggattatttgaatgaacataggacgatgagtttgaagatgatgtgtgagctatttcaagtttccagagatacagcaagaagagatattgtaaagttaacaaatgaaacaacaataatacgaactcatggtggtgtagctttatcatctttccaccgtaaaatatcggattatgtaaatcgtgaggaaaaagaaattgaatataagatatctattggaaagcaagctgcttcttttgtaggagataatgaaattatttatcttgatgtttcaacaactgttaactgtatggcttcatttttgacagcaagtaatataacggttgttacaaattcaattgatacagtaaatcatttaatggatatggagaatgtaaatattcatattttgggtggagaattaaataaacactcacgttatatggcgggtttttctgcaatggagaaactaaaagattatcattttgataaagtttttattggatcacccggccttacagaagatggtgtttattatgcgtatgaggaagatattcattttaagcgtcaaattgttaaacaaacgaatggagtgtttttacttgccgatgagacaaaaatgaatcaacgtcaaaactttaaggcactgtcattagaatcaatagatacaattattacgaatgatgttattcccggcaatttagaaagagtagtgaaagaatatggaattgagctaatcactggagtgaagtaaagggggacgcaaaaatgaagggaattatatttgatattgacggaacaatgttagatacggaaaaagcagttttatattcattacagagaacgttgcgagatgaagggatgaattattcattagaaaagctacattttgcattaggtattcctggtatggctgcgttacaagaaattggtgtggaaaatatgaaagcagttcatgagaaatggatacgtaatatggcagattt
